(19) United States
(12) Patent Application Publication
(10) Pub. No.: US 2006/0188889 A1
(43) Pub. Date: Aug. 24, 2006

(54) Use of differentially expressed nucleic acid sequences as biomarkers for cancer

(76) Inventors: Christopher Burgess, Westwood, MA (US); Susan Myerow, Lexington, MA (US); Arunthathi Thiagalingam, Lexington, MA (US); Peter Maimonis, Westwood, MA (US); Gary Molino, Norfolk, MA (US); Lawrence Burgart, Rochester, MN (US); Lisa Allyn Boardman, Rochester, MN (US); Stephen Thibodeau, Rochester, MN (US); Marcia Lewis, Cohasset, MA (US)

Correspondence Address: SONNENSCHEIN NATH & ROSENTHAL LLP;FOR PAULA EVANS, P.O. BOX 061080, WACKER DRIVE STATION, SEARS TOWER, CHICAGO, IL, 60606-1080, US

(21) Appl. No.: 10/700,439

(22) Filed: Nov. 4, 2003

(51) Int. Cl. C12Q 1/68

(52) U.S. Cl. 435/6

(57) ABSTRACT

The present invention relates to novel marker sequences that are differentially expressed in cancer cells or tissue of a subject with cancerous conditions. The present invention also relates to assays for diagnosis, prognosis, staging, monitoring, therapeutic treatment, and marker sequence related agents including probes, primers, antibodies, and therapeutic compositions.

### FIELD OF THE INVENTION

[0001] The present invention relates to methods for diagnosis, prognosis, characterization, management, and therapy of cancer including colon cancer, based on the identification of certain colon cancer-associated differentially expressed marker sequences.

### BACKGROUND OF THE INVENTION

[0002] Cancers are the second leading cause of death, next to cardiovascular disease, in the United States. The pathological and molecular mechanisms for cancer initiation and promotion have been revealed after decades of researches. Many genes are involved in the initiation and progression of cancers, including oncogenic and tumor suppressive genes. Multiple factors including genetic, endocrinologic, immunologic, and environmental factors, intertwine in the process of transformation and progression of cancers. The control and cure of cancers remain to be one of the most challenging health care tasks. Particularly, one of the most pressing health issues today is diagnosing, monitoring, and treating cancer.

[0003] Colorectal carcinoma is a malignant neoplastic disease. There is a high incidence of colorectal carcinoma in the Western world, particularly in the United States. Tumors of this type often metastasize through lymphatic and vascular channels. Many patients with colorectal carcinoma eventually die from this disease. In fact, it is estimated that 62,000 persons in the United States alone die of colorectal carcinoma annually.

[0004] However, if diagnosed early, colon cancer may be treated effectively by surgical removal of the cancerous tissue. Colorectal cancers originate in the colorectal epithelium and typically are not extensively vascularized (and therefore not invasive) during the early stages of development. Colorectal cancer is thought to result from the clonal expansion of a single mutant cell in the epithelial lining of the colon or rectum. The transition to a highly vascularized, invasive and ultimately metastatic cancer which spreads throughout the body commonly takes ten years or longer. If the cancer is detected prior to invasion, surgical removal of the cancerous tissue is an effective cure. However, colorectal cancer is often detected only upon manifestation of clinical symptoms, such as pain and black tarry stool. Generally, such symptoms are present only when the disease is well established, often after metastasis has occurred, and the prognosis for the patient is poor, even after surgical resection of the cancerous tissue. Early detection of colorectal cancer therefore is important in that detection may significantly reduce its morbidity.

[0005] Invasive diagnostic methods such as endoscopic examination allow for direct visual identification, removal, and biopsy of potentially cancerous growths such as polyps. Endoscopy is expensive, uncomfortable, inherently risky, and therefore not a practical tool for screening populations to identify those with colorectal cancer. Non-invasive analysis of stool samples for characteristics indicative of the presence of colorectal cancer or precancer is a preferred alternative for early diagnosis, but no known diagnostic methods are available which reliably achieve this goal.

### SUMMARY OF THE INVENTION

[0006] The present invention relates to nucleic acid sequences that are differentially expressed in cancer tissue compared to normal tissue, and various methods, reagents and kits for diagnosis, staging, prognosis, monitoring and treatment of cancer, including colon cancer.

[0007] In one aspect, the present invention provides methods for determining the expression levels of individual and/or combinations of the differentially expressed marker sequences in a biological sample that are indicative of the presence, or stage of the disease, or the efficacy of therapy. The method comprises contacting said sample with a polynucleotide probe or a polypeptide ligand under conditions effective for said probe or ligand to hybridize specifically to a nucleic acid or a polypeptide in said sample, and detecting the presence or absence of marker sequences. In one embodiment, methods are provided to determine the amounts and/or the differentially expressed levels at which the marker sequences of the present invention are expressed in samples. Such methods can comprise contacting said sample with a polynucleotide probe or a polypeptide ligand under conditions effective for said probe to hybridize specifically to the nucleic acids in said sample, and detecting the amounts or differentially expressed level of the marker sequences. In one preferred embodiment, said polynucleotide probe is a polynucleotide designed to identify one of the marker sequences in Tables 1 and 2. In another preferred embodiment, said polypeptide ligand is an antibody.

[0008] In another aspect, the present invention provides probes and primers designed to detect transcripts or genomic sequences corresponding to one or more marker sequences of the present invention. The probes and primers may comprise a portion or all of the sequences listed in SEQ ID NOs: 1-93, or sequences complementary thereto, or sequences which hybridize under stringent conditions to a portion or all of SEQ ID NOs: 1-93.

[0009] In another aspect, the present invention provides polypetides encoded by the marker sequences, biologically active portions thereof, and polypetide fragments suitable for use as immunogens to raise antibodies directed against polypeptides of the marker sequences of the present invention.

[0010] In another aspect, the present invention provides ligands directed to polypeptides and fragments thereof of the marker sequences of the present invention. Preferably, said polypeptide ligands are antibodies. Antibodies of the invention include, but are not limited to, polyclonal, monoclonal, multispecific, human, humanized, or chimeric antibodies, single chain antibodies, Fab fragments, Fv fragments F(ab′) fragments, fragments produced by a Fab expression library, anti-iodiotypic antibodies, or other epitope binding polypeptide. Preferably, an antibody, useful in the present invention for the detection of the individual marker sequences (and optionally at least one additional colon cancer-specific marker), is a human antibody or fragment thereof, including scFv, Fab, Fab′, F(ab′), Fd, single chain antibody, of Fv. Antibodies, useful in the invention may include a complete heavy or light chain constant region, or a portion thereof, or an absence thereof.

[0011] Another aspect of the present invention provides a method of assessing whether a subject is suffering from or at risk of developing cancer including colon cancer by detecting the differential expression of the marker sequences of the present invention. In one embodiment, the diagnostic method comprises determining whether a subject has an abnormal mRNA or cDNA and/or protein level of the marker sequences. The method comprises detecting the expression level of the individual and/or the combinations of the marker sequences in a biological sample obtained from a patient. Specifically, the method comprises:

[0012] (1). Providing a nucleic acid probe comprising a nucleotide sequence at least about 8 nucleotides in length, at least about 12 nucleotides in length, preferably at least about 15 nucleotides, more preferably about 25 nucleotides, and most preferably at least about 40 nucleotides, and up to all or nearly all of the coding sequence which is complementary to a portion of the coding sequence of a nucleic acid sequence represented by SEQ ID NOs:1-93, or a sequence complementary thereto;

[0013] (2). Obtaining a clinical sample from a patient potentially comprising one or more nucleic acid marker sequences;

[0014] (3). Providing a second clinical sample from an individual known to not have colon cancer, or a cancer-free tissue of the same patient;

[0015] (4). Contacting the nucleic acid probe under stringent conditions with RNA of each of said first and second clinical samples (e.g., in a Northern blot or in situ hybridization assay); and

[0016] (5). Comparing (a) the amount of hybridization of the probe with RNA of the first serum sample, with (b) the amount of hybridization of the probe with RNA of the second clinical sample; wherein a statistically change (e.g., either an increase or a decrease) in the amount of hybridization with the RNA of the first clinical sample as compared to the amount of hybridization with the RNA of the second clinical sample is indicative of the presence of one or more marker sequences in the first clinical sample.

[0017] In another embodiment, the diagnostic methods comprise detecting the polypeptides encoded by the marker sequences of the present invention. The assay would include contacting the polypeptides of the test cell or tissue with one or more polypeptide ligands specific for the polypeptides represented by SEQ ID NOs: 94-186, and determining the approximate amount of complex formation by the ligands and polypeptides of the test cell or tissue, wherein a statistically significant difference (either an increase or a decrease) in the amount of the complex formed with the polypeptides of a test cell or tissue as compared to a normal cell or tissue is an indication that the test cell is cancerous or pre-cancerous. In particular, the assay evaluates the level of marker polypeptide in the test cells, and preferably, compares the measured level with marker polypeptide detected in at least one control cell, e.g., a normal cell and/or a transformed cell of known phenotype.

[0018] In another aspect, the present invention provides DNA and protein microarrays for detecting the differential expression levels of the marker sequences. In some embodiments, the microarrays comprise at least 2, 3, 4, 5, 6, 7, 8, 9, 10, 11, 12, 13, 14, or 15, or more nucleic acids that are complimentary to at least a portion of the coding sequences of the marker sequences represented by SEQ ID NOs: 1-93. In some embodiments, the microarrays comprise antibodies or antigen-binding fragments thereof, that specifically bind to at least 2, 3, 4, 5, 6, 7, 8, 9, 10, 11, 12, 13, 14, 15, 16, 17, 18, 19, 20, 21, 22, 23, 24, 25, 26, 27, 28, 29, 30, 31, 32, 33, 34, 35, 36, 37, 38, 39, or 40 different marker polypeptides encoded by nucleic acids comprising a nucleotide sequence selected from the group consisting of SEQ ID NOs: 1-93. In one embodiment, the probe/primer can comprise a sequence that hybridizes under stringent conditions to at least about 7, preferably 12, preferably about 15, more preferably about 25, 50, 75, 100, 125, 150, 175, 200, 250, 300, 350, or 400, or more consecutive nucleotides of SEQ ID NOs: 1-93 of the present invention. In another embodiment, the probe/primer can comprise a sequence that hybridizes under moderately stringent conditions to at least about 7, preferably 12, preferably about 15, more preferably about 25, 50, 75, 100, 125, 150, 175, 200, 250, 300, 350, or 400, or more consecutive nucleotides of SEQ ID NOs: 1-93 of the present invention.

[0019] In another aspect, the present invention provides methods for determining cancer prognosis and stage based on examining the expression levels of the nucleic acid marker sequences and polypeptides using the methods described in the present invention.

[0020] In one embodiment, the methods comprise:

[0021] (1). detecting in a biological sample of the subject at a first point in time, the expression of one or more nucleic acid sequences comprising one or more nucleic acid sequences selected from the group consisting of SEQ ID NOs: 1-93;

[0022] (2). repeating step (a) at a subsequent point in time; and

[0023] (3). comparing the expression level detected in steps (a) and (b), wherein a change in the expression level is indicative of progression of cancer or a pre-malignant condition thereof in the subject.

[0024] In another embodiment, the methods comprise:

[0025] (1). detecting in a biological sample of the subject at a first point in time, the expression of one or more polypeptides comprising one or more polypeptide sequences selected from the group consisting of SEQ ID NOs: 94-186;

[0026] (2). repeating step (a) at a subsequent point in time; and

[0027] (3). comparing the expression level detected in steps (a) and (b), wherein a change in the expression level is indicative of progression of cancer or a pre-malignant condition thereof in the subject.

[0028] In another aspect, the present invention also provides methods that permit the assessment and/or monitoring of patients who will be likely to benefit from both traditional and non-traditional treatments and therapies for cancers, particularly colon cancer. The methods include assessing the levels of one or more of the marker sequences in a biological sample for the purposes of determining the status of a patient's disease an/or the efficacy, reaction, and response to cancer or neoplastic disease treatments or therapies that the patient is undergoing.

[0029] The present invention also includes methods of assessing the efficacy of a test composition for inhibiting cancer including colon cancer. The methods comprise comparing expression levels of one or more marker sequences in a first biological sample maintained in the presence of a test composition with the expression levels of the same marker sequences in a second biological sample maintained in the absence of the test composition.

[0030] In another aspect, the present invention provides assays for determining compounds that modulate the biological activity of the nucleic acids or the polypeptides encoded by the marker sequences. Methods of identifying compounds generally comprise steps in which a compound is placed in contact with a marker sequence, its transcription product, its translation product, or other target, and determination of whether the compound modulates the marker sequence.

[0031] In another aspect, the present invention also provides methods for screening drugs that inhibit cancer including colon cancer. Drug screening is performed by adding a test compound to a sample of cells and monitoring the effect. The screening methods may include both in vitro and in vivo screening of a cell or tissue.

[0032] In another aspect, the present invention also provides kits for determining the differential expression levels of the marker sequences of the present invention in a biological sample. Such kits can be used to determine (1) presence or absence of cancer, (2) prognosis and stage of cancer, (3) drugs that inhibit cancer, and (4) treatment for cancer.

### DETAILED DESCRIPTION OF THE INVENTION

I General

[0033] The present invention is based, in part, on the identification of marker sequences that are differentially expressed (including both over- and under-expression of the sequences) in various types of humans cells (i.e., cells obtained from a human, cultured human cells, archived or preserved human cells, and in vivo cells) relative to normal (i.e., non-cancerous) human cells. It has been discovered that the level of expression of individual marker sequences and combinations of marker sequences described in the present invention correlates with the presence of cancer or pre-malignant condition in a patient. The expression of one or more marker sequences in human cells can be assessed by detecting the RNA transcripts and/or proteins encoded by the marker sequences. Accordingly, the present invention provides methods for identifying cancer, particularly colon cancer, in an individual by screening for sequences which are over- or under-expressed in cancerous cells relative to the level of expression in normal cells, such as cells from colon tissue. Particularly, the present invention provides a method for the identifying colon cancer in an individual by detecting individual marker sequences and/or combinations of marker sequences in the individual relative to a control expression level of the marker sequences in an individual without cancer. The present invention further provides methods for monitoring the onset, progression, or regression of cancer, particularly colon cancer, in an individual by monitoring the expression level of individual marker sequences and/or combinations of marker sequences in the individual at different points in time. The present invention further provides methods for assessing the efficacy of a therapy for inhibiting cancer, particularly colon cancer in a patient by comparing the expression level of individual marker sequences and/or combinations of marker sequences in the individual prior to and after the therapeutic treatment. The present invention further provides methods for selecting a composition for inhibiting cancer, particularly colon cancer, in a patient by comparing the expression level of individual marker sequences and/or combinations of marker sequences in the presence and absence of the composition. The present invention further provides methods for inhibiting cancer, particularly colon cancer, in a patient by administering to the patient a therapeutic composition, wherein the efficacy of the therapeutic composition is indicated by the change in the expression level of individual marker sequences and/or combinations of marker sequences.

[0034] In addition to the above methods, the present invention also provides compositions and various kits for the use in the above methods.

II Definitions

[0035] As used herein, the term “differentially expressed” refers to expression levels in a test cell that differ significantly from levels in a reference cell, e.g., mRNA is found at levels at least about 25%, at least about 50% to about 75%, at least about 90% increased or decreased, generally at least about 1.2-fold, at least about 1.5-fold, at least about 2-fold, at least about 5-fold, at least about 10-fold, or at least about 50-fold or more increased or decreased in a cancerous cell when compared with a cell of the same type that is not cancerous. The comparison can be made between two tissues, for example, if one is using in situ hybridization or another assay method that allows some degree of discrimination among cell types in the tissue. The comparison may also be made between cells removed from their tissue source. “Differential expression” refers to both quantitative, as well as qualitative, differences in the genes' temporal and/or cellular expression patterns among, for example, normal and neoplastic tumor cells, and/or among tumor cells which have undergone different tumor progression events.

[0036] As used herein, the term “a biological sample” refers to a whole organism or a subset of its tissues, cells or component parts (e.g. body fluids, including but not limited to blood, mucus, lymphatic fluid, synovial fluid, cerebrospinal fluid, saliva, amniotic fluid, amniotic cord blood, urine, vaginal fluid and semen). “A biological sample” further refers to a homogenate, lysate or extract prepared from a whole organism or a subset of its tissues, cells or component parts, or a fraction or portion thereof, including but not limited to, for example, plasma, serum, spinal fluid, lymph fluid, the external sections of the skin, respiratory, intestinal, and genitourinary tracts, tears, saliva, milk, blood cells, tumors, organs. Most often, the sample has been removed from an animal, but the term “biological sample” can also refer to cells or tissue analyzed in vivo, i.e., without removal from animal. Typically, a “biological sample” will contain cells from the animal, but the term can also refer to non-cellular biological material, such as non-cellular fractions of blood, saliva, or urine, that can be used to measure the cancer-associated polynucleotide or polypeptides levels. “A biological sample” further refers to a medium, such as a nutrient broth or gel in which an organism has been propagated, which contains cellular components, such as proteins or nucleic acid molecules.

[0037] As used herein, the term “nucleic acid” refers to polynucleotides such as deoxyribonucleic acid (DNA), and, where appropriate, ribonucleic acid (RNA). The term should also be understood to include, as equivalents, analogs of either RNA or DNA made from nucleotide analogs, and, as applicable to the embodiment being described, single (sense or antisense) and double-stranded polynucleotides. ESTs, chromosomes, cDNAs, mRNAs, and rRNAs are representative examples of molecules that may be referred to as nucleic acids.

[0038] As used herein, the term “change in the expression level” refers to either an increase or a decrease of the expression level in a test sample from the control level by an amount greater than the standard error of the assay employed to assess expression. Preferably, the change is by at least about twice, and more preferably three, four, five or ten times that amount. For increase, the change is determined by comparing the expression level in the test sample to the control level. For decrease, the change is determined by comparing the control level to the expression level in the test sample. Alternatively, the decrease is determined by comparing the expression level in the test sample to the control level and the decrease in the expression level is by at least about 15%, 25%, 30%, 40%, 50%, 65%, 80%, or greater. The term “significant change in the specific binding” refers to either an increase or a decrease from the specific binding in the cancer-free sample by at least about 10%, 20%, 25%, 30%, preferably at least about 40%, 50%, more preferably at least about 60%, 70%, or 90%.

[0039] As used herein, the term “expression level of one or more nucleic acid sequences” refers to the amount of mRNA transcribed from the corresponding genes that are present in a biological sample. The expression level can be detected with or without comparison to a level from a control sample or a level expected of a control sample.

[0040] As used herein, the term “control expression level of one or more nucleic acid sequences” refers to the amount of mRNA transcribed from the corresponding genes that are present in a biological sample representative of healthy, cancer-free subjects. The term “control expression level” can also refer to an established level of mRNA representative of the cancer-free population, that has been previously established based on measurement from healthy, cancer-free subjects.

[0041] As used herein, the term “cancerous cell” or “cancer cell”, used either in the singular or plural form, refers to cells that have undergone a malignant transformation that makes them pathological to the host organism. Malignant transformation is a single- or multi-step process, which involves in part an alteration in the genetic makeup of the cell and/or the gene expression profile. Malignant transformation may occur either spontaneously, or via an event or combination of events such as drug or chemical treatment, radiation, fusion with other cells, Viral infection, or activation or inactivation of particular genes. Malignant transformation may occur in vivo or in vitro, and can if necessary be experimentally induced. Malignant cells may be found within the well-defined tumor mass or may have metastasized to other physical locations. A feature of cancer cells is the tendency to grow in a manner that is uncontrollable by the host, but the pathology associated with a particular cancer cell may take any form. Primary cancer cells (that is, cells obtained from near the site of malignant transformation) can be readily distinguished from non-cancerous cells by well-established pathology techniques, particularly histological examination. The definition of a cancer cell, as used herein, includes not only a primary cancer cell, but any cell derived from a cancer cell ancestor. This includes metastasized cancer cells, and in vitro cultures and cell lines derived from cancer cells.

[0042] As used herein, the term “efficacy” refers to either inhibition to some extent, of cell growth causing or contributing to a cell proliferative disorder, or the inhibition, to some extent, of the production of factors (e.g., growth factors) causing or contributing to a cell proliferative disorder. “A therapeutic efficacy” refers to relief of one or more of the symptoms of a cell proliferative disorder. In reference to the treatment of a cancer, a therapeutic efficacy refers to one or more of the following: 1) reduction in the number of cancer cells; 2) reduction in tumor size; 3) inhibition (i.e., slowing to some extent, preferably stopping) of cancer cell infiltration into peripheral organs; 3) inhibition (i.e., slowing to some extent, preferably stopping) of tumor metastasis; 4) inhibition, to some extent, of tumor growth; and/or 5) relieving to some extent one or more of the symptoms associated with the disorder. In reference to the treatment of a cell proliferative disorder other than a cancer, a therapeutic efficacy refers to 1) either inhibition to some extent, of the growth of cells causing the disorder; 2) the inhibition, to some extent, of the production of factors (e.g., growth factors) causing the disorder; and/or 3) relieving to some extent one or more of the symptoms associated with the disorder.

[0043] As used herein, the term “detectable label” refers to a composition detectable by spectroscopic, photochemical, biochemical, immunochemical, or chemical means.

[0044] As used herein, the term “a polynucleotide probe” refers to a nucleic acid capable of binding to a target nucleic acid of complementary sequence through one or more types of chemical bonds, usually through complementary base pairing, usually through hydrogen bond formation. As used herein, a probe may include natural (i.e., A, G, C, or T) or modified on bases (7-deazaguanosine, inosine, etc.) or on sugar moiety. In addition, the bases in a probe may be joined by a linkage other than a phosphodiester bond, so long as it does not interfere with hybridization. Thus, for example, probes may be peptide nucleic acids in which the constituent bases are joined by peptide bonds rather than phosphodiester linkages. It will be understood by one of skill in the art that probes may bind target sequences lacking complete complementarity with the probe sequence depending upon the stringency of the hybridization conditions. The probes are preferably directly labeled as with isotopes, chromophores, lumiphores, chromogens, or indirectly labeled such as with biotin to which a streptavidin complex may later bind. By assaying for the presence or absence of the probe, one can detect the presence or absence of the select sequence or subsequence.

[0045] As used herein, the term “hybridization” refers to any process by which a strand of nucleic acid binds with a complementary strand through base pairing.

[0046] As used herein, the term “subject” refers to any human or non-human organism.

[0047] As used herein, “individual” refers to a mammal, preferably a human.

[0048] As used herein, “detecting” refers to the identification of the presence or absence of a molecule in a sample. Where the molecule to be detected is a polypeptide, the step of detecting can be performed by binding the polypeptide with an antibody that is detectably labeled. A detectable label is a molecule which is capable of generating, either independently, or in response to a stimulus, an observable signal. A detectable label can be, but is not limited to a fluorescent label, a chromogenic label, a luminescent label, or a radioactive label. Methods for “detecting” a label include quantitative and qualitative methods adapted for standard or confocal microscopy, FACS analysis, and those adapted for high throughput methods involving multi-well plates, arrays or microarrays. One of skill in the art can select appropriate filter sets and excitation energy sources for the detection of fluorescent emission from a given fluorescent polypeptide or dye. “Detecting” as used herein can also include the use of multiple antibodies to a polypeptide to be detected, wherein the multiple antibodies bind to different epitopes on the polypeptide to be detected. Antibodies used in this manner can employ two or more detectable labels, and can include, for example a FRET pair. A polypeptide molecule is “detected” according to the present invention when the level of detectable signal is at all greater than the background level of the detectable label, or where the level of measured nucleic acid is at all greater than the level measured in a control sample.

[0049] As used herein, “detecting” also refers to detecting the presence of a target nucleic acid molecule (e.g., a nucleic acid molecule encoding the marker sequence) refers to a process wherein the signal generated by a directly or indirectly labeled probe nucleic acid molecule (capable of hybridizing to a target, e.g., a sequence encoding Regla, in a serum sample) is measured or observed. Thus, detection of the probe nucleic acid is directly indicative of the presence, and thus the detection, of a target nucleic acid, such as a sequence encoding a marker sequence. For example, if the detectable label is a fluorescent label, the target nucleic acid is “detected” by observing or measuring the light emitted by the fluorescent label on the probe nucleic acid when it is excited by the appropriate wavelength, or if the detectable label is a fluorescence/quencher pair, the target nucleic acid is “detected” by observing or measuring the light emitted upon association or dissociation of the fluorescence/quencher pair present on the probe nucleic acid, wherein detection of the probe nucleic acid indicates detection of the target nucleic acid. If the detectable label is a radioactive label, the target nucleic acid, following hybridization with a radioactively labeled probe is “detected” by, for example, autoradiography. Methods and techniques for “detecting” fluorescent, radioactive, and other chemical labels may be found in Ausubel et al. (1995, Short Protocols in Molecular Biology, 3^{rd} Ed. John Wiley and Sons, Inc.). Alternatively, a nucleic acid may be “indirectly detected” wherein a moiety is attached to a probe nucleic acid which will hybridize with the target, such as an enzyme activity, allowing detection in the presence of an appropriate substrate, or a specific antigen or other marker allowing detection by addition of an antibody or other specific indicator. Alternatively, a target nucleic acid molecule can be detected by amplifying a nucleic acid sample prepared from a patient clinical sample, using oligonucleotide primers which are specifically designed to hybridize with a portion of the target nucleic acid sequence. Quantitative amplification methods, such as, but not limited to TaqMan, may also be used to “detect” a target nucleic acid according to the invention. A nucleic acid molecule is “detected” as used herein where the level of nucleic acid measured (such as by quantitative PCR), or the level of detectable signal provided by the detectable label is at all above the background level.

[0050] As used herein, “detecting” refers further to the early detection of colorectal cancer in a patient, wherein “early” detection refers to the detection of colorectal cancer at Dukes stage A or preferably, prior to a time when the colorectal cancer is morphologically able to be classified in a particular Dukes stage. “Detecting” as used herein further refers to the detection of colorectal cancer recurrence in an individual, using the same detection criteria as indicated above. “Detecting” as used herein still further refers to the measuring of a change in the degree of colorectal cancer before and/or after treatment with a therapeutic compound. In this case, a change in the degree of colorectal cancer in response to a therapeutic compound refers to an increase or decrease in the expression of the marker sequences including one or more colorectal cancer associated markers, or alternatively, in the amount of the marker polypeptide including one or more colorectal cancer associated markers presented in a clinical sample by at least 10% in response to the presence of a therapeutic compound relative to the expression level in the absence of the therapeutic compound.

[0051] As used herein, the term “polypeptide” refers to a polymer in which the monomers are amino acids and are joined together through peptide or disulfide bonds. It also refers to either a full-length naturally-occurring amino acid sequence or a fragment thereof between about 8 and about 500 amino acids in length. Additionally, unnatural amino acids, for example, β-alanine, phenyl glycine and homoarginine may be included. Commonly-encountered amino acids which are not gene-encoded may also be used in the present invention. All of the amino acids used in the present invention may be either the D- or L-optical isomer. The L-isomers are preferred.

[0052] As used herein, the term “ligand” refers to any compound that interacts with the ligand binding domain of a receptor and modulate its activity. The term “ligand” also refers to a molecule, such as a peptide or variable segment sequence, that is recognized by a particular receptor. As one of ordinary skill in the art will recognize, a molecule (or macromolecular complex) can be both a receptor and a ligand. In general, the binding partner having a smaller molecular weight is referred to as the ligand and the binding partner having a greater molecular weight is referred to as a receptor. Representative ligands include but are not limited to drugs, drug derivatives, isomers thereof, hormones, polypeptides, nucleotides, and the like.

[0053] The term “antibody” refers to the conventional immunoglobulin molecule, as well as fragments thereof which are also specifically reactive with one of the subject polypeptides. Antibodies can be fragmented using conventional techniques and the fragments screened for utility in the same manner as described herein below for whole antibodies. For example, F(ab)₂ fragments can be generated by treating antibody with pepsin. The resulting F(ab)₂ fragment can be treated to reduce disulfide bridges to produce Fab fragments. The antibody of the present invention is further intended to include bispecific, single-chain, and chimeric and humanized molecules having affinity for a polypeptide conferred by at least one CDR region of the antibody. In preferred embodiments, the antibodies, the antibody further comprises a label attached thereto and able to be detected, (e.g., the label can be a radioisotope, fluorescent compound, chemiluminescent compound, enzyme, or enzyme co-factor).

[0054] The term “monoclonal antibody” refers to an antibody that recognizes only one type of antigen. This type of antibodies is produced by the daughter cells of a single antibody-producing hybridoma.

[0055] As used herein, the terms specific “binding” or “specifically binding”, refers to the interaction of an antibody and a protein or peptide. The interaction is dependent upon the presence of a particular structure (i.e., the antigenic determinant or epitope) on the protein; in other words, the antibody is recognizing and binding to a specific protein structure rather than to proteins in general. For example, if an antibody is specific for epitope A, the presence of a protein containing epitope A (or free, unlabeled A) in a reaction containing labeled “A” and the antibody will reduce the amount of labeled A bound to the antibody.

III Identification of Marker Sequences

[0056] One aspect of the present invention pertains to identification of differentially expressed marker sequences (either over- or under-expressed) in a biological sample from a patient with cancerous or pre-malignant conditions. In general, the method of identifying the marker sequences involves providing a pool of target nucleic acids (derived from both tumor and normal cells and/or tissue) comprising RNA transcripts of one or more target genes, or nucleic acids derived from the RNA transcripts, hybridizing the nucleic acid sample to one or more probes, and detecting the hybridized nucleic acids and calculating a relative expression level relative to the control expression level of the same nucleic acids. A variety of methods have been employed to achieve this end. They include differential screening of cDNA libraries with selective probes, subtractive hybridization utilizing DNA/DNA hybrids or DNA/RNA hybrids, RNA fingerprinting and differential display (Mather, et al. (1981) Cell 23:369-378; Hedrick et al. (1984) Nature 308:149-153; Davis et al. (1992) Cell 51:987-1000; Welsh et al. (1992) Nucleic Acids Res. 20:4965-4970; and Liang and Pardee (1992) Science 257:967-971). Recently, PCR-coupled subtractive processes have also been reported (Straus and Ausubel (1990) Proc. Natl. Sci. USA 87:1889-1893; Sive and John (1988) Nucleic Acids Res. 16:10937; Wieland et al. (1990) Proc. Natl. Acad. Sci. USA 87:2720-2724; Wang and Brown (1991) Proc. Natl. Acad. Sci. USA 88:11505-11509; Lisitsyn et al. (1993) Science 259:946-951; Zeng et al. (1994) Nucleic Acids Res. 22:4381-4385; Hubank and Schatz (1994) Nucleic Acids Res. 22:5640-5648). Also recently, a microarray technology (DNA chips) developed by Affymetrix (Santa Clara, Calif.) has been used as a powerful tool to simultaneously identify a large number of differentially expressed genes in a biological sample. Each of these methods can be employed in the present invention and is hereby incorporated by reference in entirety.

[0057] By using the Affymetrix chips (GeneChip Human Genome U133 Set), the inventors of the present invention identified two clusters of differentially expressed marker sequences that have shown at least a two-fold change (either increase or decrease) in expression level in biological samples from tumor cells and/or tissue, e.g., colon cancer-derived cells and/or tissue, relative to the expression level in samples from normal cells and/or tissue, e.g., normal colon tissue and/or normal non-colon tissue. Table 1 describes 47 marker sequences that are over-expressed (up-regulated) in tumor cells and/or tissue, e.g., colon cancer-derived cells and/or tissue.

TABLE 1
Over-expressed Marker sequences

| | | | | Corresponding | |
|---|---|---|---|---|---|
| SEQ | | | | Protein | Protein |
| ID | Gene Symbol & | Accession | | Accession | SEQ |
| NO | Locus ID | Number | Type | Number | ID NO |
| 1 | KRT23, 25984 | NM_015515 | RNA | NP_056330 | 94 |
| 2 | REG1A, 5967 | NM_002909 | RNA | NP_002900 | 95 |
| 3 | REG1B, 5968 | NM_006507 | RNA | NP_006498 | 96 |
| 4 | DPEP1, 1800 | NM_004413 | RNA | NP_004404 | 97 |
| 5 | IL8, 3576 | NM_000584 | RNA | NP_00575 | 98 |
| 6 | MMP1, 4312 | NM_002421 | RNA | NP_002412 | 99 |
| 7 | MMP7, 4316 | NM_002423 | RNA | NP_002414 | 100 |
| 8 | SSP1, 6696 | NM_000582 | RNA | NP_000573 | 101 |
| 9 | CXCL10, 3627 | NM_001565 | RNA | NP_001556 | 102 |
| 10 | SULF1, 23213 | NM_015170 | RNA | NP_055985 | 103 |
| 11 | COL5A2, 1290 | NM_000393 | RNA | NP_000384 | 104 |
| 12 | CXCL1, 2919 | NM_001511 | RNA | NP_001502 | 105 |
| 13 | CCL18, 6362 | NM_002988 | RNA | NP_002979 | 106 |
| 14 | CDH11, 1009 | NM_001797 | RNA | NP_001788 | 107 |
| 15 | BST2, 684 | NM_004335 | RNA | NP_004326 | 108 |
| 16 | C20orf97, | NM_021158 | RNA | NP_066981 | 109 |
| | 57761 | | | | |
| 17 | THBS2, 7058 | NM_003247 | RNA | NP_003238 | 110 |
| 18 | G1P3, 2537 | NM_022873 | RNA | NP_075011 | 111 |
| 19 | CKTSF1B1, | NM_013372 | RNA | NP_037504 | 112 |
| | 26585 | | | | |
| 20 | MMP9, 4318 | NM_004994 | RNA | NP_004985 | 113 |
| 21 | RAB31, 11031 | NM_006868 | RNA | NP_006859 | 114 |
| 22 | DD96, 10158 | NM_005764 | RNA | NP_005755 | 115 |
| 23 | SUPT4H1, 6827 | NM_003168 | RNA | NP_003159 | 116 |
| 24 | FXYD5, 53827 | NM_014164 | RNA | NP_054883 | 117 |
| 25 | CSPG2, 1462 | NM_004385 | RNA | NP_004376 | 118 |
| 26 | LAPTM4B, | NM_018407 | RNA | NP_060877 | 119 |
| | 55353 | | | | |
| 27 | SOX4, 6659 | NM_003107 | RNA | NP_003098 | 120 |
| 28 | SORD, 6652 | NM_003104 | RNA | NP_003095 | 121 |
| 29 | MMP12, 4321 | NM_002426 | RNA | NP_002417 | 122 |
| 30 | UBD, 10537 | NM_006398 | RNA | NP_006389 | 123 |
| 31 | DKFZp564I1922, | NM_015419 | RNA | NP_056234 | 124 |
| | 25878 | | | | |
| 32 | COL1A1, 1277 | NM_000088 | RNA | NP_000079 | 125 |
| 33 | PLAB, 9518 | NM_004864 | RNA | NP_004855 | 126 |
| 34 | SCD, 6319 | NM_005063 | RNA | NP_005054 | 127 |
| 35 | CCL20, 6364 | NM_004591 | RNA | NP_004582 | 128 |
| 36 | BACE2, 25825 | NM_012105 | RNA | NP_036237 | 129 |
| 37 | GTF3A, 2971 | NM_002097 | RNA | NP_002088 | 130 |
| 38 | C20orf42, | NM_017671 | RNA | NP_060141 | 131 |
| | 55612 | | | | |
| 39 | OSF-2, 10631 | NM_006475 | RNA | NP_006466 | 132 |
| 40 | SPARC, 6678 | NM_003118 | RNA | NP_003109 | 133 |
| 41 | TGFBI, 7045 | NM_000358 | RNA | NP_000349 | 134 |
| 42 | FN1, 2335 | NM_002026 | RNA | NP_002017 | 135 |
| 43 | COL1A2, 1278 | NM_000089 | RNA | NP_000080 | 136 |
| 44 | S100A11, 6282 | NM_005620 | RNA | NP_005611 | 137 |
| 45 | IFITM1, 8519 | NM_003641 | RNA | NP_003632 | 138 |
| 46 | | AF130095 | RNA | AAG35520 | 139 |
| 47 | COL3A1, 1281 | NM_000090 | RNA | NP_000081 | 140 |

[0058] Accordingly, the present invention provides marker sequences in Table 1 that are over-expressed by at least about 2 fold, at least about 5 fold, at least about 10 fold, at least about 20 fold, or at least about 50 fold. In one embodiment, the present invention encompasses marker sequences that are over-expressed (up-regulated) in tumor cells and/or tissue, especially in colon cancer cells and/or tissue and/or colon cancer-derived cell lines. In a preferred embodiment, the marker sequences are over-expressed (up-regulated) by at least about 2 fold, at least about 5 fold, at least about 10 fold, at least about 20 fold, or at least about 50 fold.

[0059] Table 2 describes 46 marker sequences that are under-expressed (down-regulated) in tumor cells and/or tissue, e.g., colon cancer-derived cells and/or tissue.

TABLE 2
Under-expressed Marker sequences

| | | | | Corresponding | |
|---|---|---|---|---|---|
| SEQ | | | | Protein | Protein |
| ID | Gene Symbol & | Accession | | Accession | SEQ |
| NO | Locus ID | Number | Type | Number | ID NO |
| 48 | GCG, 2641 | NM_002054 | RNA | NP_002045 | 141 |
| 49 | SPINK5, 11005 | NM_006846 | RNA | NP_006837 | 142 |
| 50 | ANPEP, 290 | NM_001150 | RNA | NP_001141 | 143 |
| 51 | AQP8, 343 | NM_001169 | RNA | NP_001160 | 144 |
| 52 | GUCA2B, 2981 | NM_007102 | RNA | NP_009033 | 145 |
| 53 | CLCA4, 22802 | NM_012128 | RNA | NP_036260 | 146 |
| 54 | PRV1, 57126 | NM_020406 | RNA | NP_065139 | 147 |
| 55 | EKI1, 55500 | NM_018638 | RNA | NP_061108 | 148 |
| 56 | FLJ22595, | NM_025047 | RNA | NP_079323 | 149 |
| | 80117 | | | | |
| 57 | UGT2B15 | NM_001076 | RNA | NP_001067 | 150 |
| 58 | CEACAM7, | NM_006890 | RNA | NP_008821 | 151 |
| | 1087 | | | | |
| 59 | CHGA, 1113 | NM_001275 | RNA | NP_001266 | 152 |
| 60 | HPGD, 3248 | NM_000860 | RNA | NP_000851 | 153 |
| 61 | MGC4172, | NM_024308 | RNA | NP_077284 | 154 |
| | 79154 | | | | |
| 62 | CA4, 762 | NM_000717 | RNA | NP_000708 | 155 |
| 63 | IL1R2, 7850 | NM_004633 | RNA | NP_004624 | 156 |
| 64 | FLJ20127, | NM_017678 | RNA | NP_060148 | 157 |
| | 54827 | | | | |
| 65 | MS4A12, 54860 | NM_017716 | RNA | NP_060186 | 158 |
| 66 | EMP1, 2012 | NM_001423 | RNA | NP_001414 | 159 |
| 67 | SLC4A4, 8671 | NM_003759 | RNA | NP_003750 | 160 |
| 68 | ADH1C, 126 | NM_000669 | RNA | NP_000660 | 161 |
| 69 | CEACAM1, 634 | NM_001712 | RNA | NP_001703 | 162 |
| 70 | MAWBP, 64081 | NM_022129 | RNA | NP_071412 | 163 |
| 71 | PCK1, 5105 | NM_002591 | RNA | NP_002582 | 164 |
| 72 | UGT2B17, 7367 | NM_001077 | RNA | NP_001068 | 165 |
| 73 | HSD17B2 | NM_002153 | RNA | NP_002144 | 166 |
| 74 | LOC63928, | NM_022097 | RNA | NP_071380 | 167 |
| | 63928 | | | | |
| 75 | RDHL, 10170 | NM_005771 | RNA | NP_005762 | 168 |
| 76 | GUCA1B, 2979 | NM_002098 | RNA | NP_002089 | 169 |
| 77 | FHL1, 2273 | NM_001449 | RNA | NP_001440 | 170 |
| 78 | ADAMDEC1, | NM_014479 | RNA | NP_055294 | 171 |
| | 27299 | | | | |
| 79 | SPINK4, 27290 | NM_014471 | RNA | NP_055286 | 172 |
| 80 | CA1, 759 | NM_001738 | RNA | NP_001729 | 173 |
| 81 | SGK, 6446 | NM_005627 | RNA | NP_005618 | 174 |
| 82 | CKB, 1152 | NM_001823 | RNA | NP_001814 | 175 |
| 83 | SLC26A2, 1836 | NM_000112 | RNA | NP_000103 | 176 |
| 84 | RNAHP, 11325 | NM_007372 | RNA | NP_031398 | 177 |
| 85 | MUC2, 4583 | NM_002457 | RNA | NP_002448 | 178 |
| 86 | HMGCS2, 3258 | NM_005518 | RNA | NP_005509 | 179 |
| 87 | CLCA1, 1179 | NM_001285 | RNA | NP_001276 | 180 |
| 88 | MT1F, 4494 | NM_005949 | RNA | NP_005940 | 181 |
| 89 | CA2, 760 | NM_000067 | RNA | NP_000058 | 182 |
| 90 | MT1H, 4496 | NM_005951 | RNA | NP_005942 | 183 |
| 91 | MT1G, 4495 | NM_005950 | RNA | NP_005941 | 184 |
| 92 | ZG16, 123887 | NM_152338 | RNA | NP_689551 | 185 |
| 93 | MT1X, 4501 | NM_005952 | RNA | NP_005943 | 186 |

[0060] Accordingly, the present invention provides marker sequences in Table 2 that are under-expressed (down-regulated) by at least about 2 fold, at least about 5 fold, at least about 10 fold, at least about 20 fold, or at least about 50 fold. In one embodiment, the present invention encompasses marker sequences that are over-expressed (down-regulated) in tumor cells and/or tissue, especially in colon cancer cells and/or tissue and/or colon cancer-derived cell lines. In a preferred embodiment, the marker sequences are under-expressed (down-regulated) by at least about 2 fold, at least about 5 fold, at least about 10 fold, at least about 20 fold, or at least about 50 fold.

[0061] The present invention also encompasses sequences which differ from the marker sequences identified in Tables 1 and 2, but which produce the same phenotypic effect, for example, an allelic variant.

[0062] The present invention further encompasses polynucleotides which are at least about 85%, or at least about 90%, or more preferably equal to or greater than about 95% identical to the sequences of the RNA transcripts or cDNAs of the marker sequences. Sequence identity as used herein refers to the proportion of base matches between two nucleic acid sequences or the proportion amino acid matches between two amino acid sequences. When sequence homology is expressed as a percentage, e.g., 50%, the percentage denotes the proportion of matches over the length of sequence from one sequence that is compared to some other sequence.

[0063] The identification of marker sequences that are differentially expressed in tumor cells and/or tissue as compared to normal cells and/or tissue, has applications in a number of ways. For example, diagnosis may be done or confirmed by comparing patient samples with the known expression profiles. Similarly, a particular treatment may be evaluated, such evaluation including whether a therapeutic treatment improves the long-term prognosis in a particular patient. Furthermore, the gene expression profiles or individual genes allow screening drug candidates. These methods can also be done at protein level. That is, protein expression levels of the marker sequences associated with the tumor or pre-malignant conditions can be evaluated for diagnostic and prognostic purposes or for screening candidate composition for inhibiting tumors or pre-malignant conditions.

IV Primers and Probes

[0064] The nucleic acid sequences of the identified marker sequences that are differentially expressed in tumor cells and/or tissue will further allow for the generation of probes and primers designed to detect transcripts or genomic sequences corresponding to one or more marker sequences of the present invention. The probe/primer is typically used as one or more substantially purified oligonucleotides. The primer/probe may comprise a portion or all of the sequences listed in SEQ ID NOs: 1-93, or sequences complementary thereto, or sequences which hybridize under stringent conditions to a portion or all of SEQ ID NOs: 1-93. In one embodiment, the probe/primer can comprise a sequence that hybridizes under stringent conditions to at least about 7, preferably about 12, preferably about 15, more preferably about 25, 50, 75, 100, 125, 150, 175, 200, 250, 300, 350, or 400, or more consecutive nucleotides of SEQ ID NOs: 1-93 of the present invention. As used herein, the term “hybridizes under stringent conditions” is intended to describe conditions for hybridization and washing under which nucleotide sequences at least about 75% (about 80%, 85%, preferably about 90%) identical to each other typically remain hybridized to each other. Such stringent conditions are known to those skilled in the art and can be found in sections 6.3.1-6.3.6 of Current Protocols in Molecular Biology, John Wiley & Sons, N.Y. (1989). A preferred, non-limiting example of stringent hybridization conditions for annealing two single-stranded DNA each of which is at least about 100 bases in length and/or for annealing a single-stranded DNA and a single-stranded RNA each of which is at least about 100 bases in length, are hybridization in 6× sodium chloride/sodium citrate (SSC) at about 45° C., followed by one or more washes in 0.2×SSC, 0.1% SDS at 50-65° C. Further preferred hybridization conditions are taught in Lockhart, et al., Nature Biotechnology, 14:1675-1680 (1996); Breslauer, et al., Proc. Natl. Acad. Sci. USA, 83:3746-3750 (1986); Van Ness, et al., Nucleic Acids Research, 19: 5143-5151 (1991); McGraw, et al., BioTechniques, 8: 674-678 (1990); and Milner, et al., Nature Biotechnology, 15: 537-541 (1997), all expressly incorporated by reference.

[0065] In another embodiment, the probe/primer can comprise a sequence that hybridizes under moderately stringent conditions to at least about 7, preferably 12, preferably about 15, more preferably about 25, 50, 75, 100, 125, 150, 175, 200, 250, 300, 350, or 400, or more consecutive nucleotides of SEQ ID NOs: 1-93 of the present invention. For purposes of illustration, suitable moderately stringent conditions for testing the hybridization of a polynucleotide of this invention with other polynucleotides include prewashing in a solution of 5×SSC, 0.5% SDS, 1.0 mM EDTA (pH 8.0); hybridizing at 50° C. to 60° C., 5×SSC, overnight; followed by washing twice at 65° C. for 20 minutes with each of 2×, 0.5×, and 0.2×SSC containing 0.1% SDS. One skilled in the art will understand that the stringency of hybridization can be readily manipulated, such as by altering the salt content of the hybridization solution and/or the temperature at which the hybridization is performed.

[0066] In particular, these probes are useful because they provide a method for detecting mutations in wild-type marker sequences of the present invention. Nucleic acid probes which are complementary to a wild-type marker sequence of the present invention and can form mismatches with mutant marker sequences are provided, allowing for detection by enzymatic or chemical cleavage or by shifts in electrophoretic mobility. Likewise, probes based on the subject sequences can be used to detect transcripts or genomic sequences encoding the same or homologous proteins, for use, for example, in prognostic or diagnostic assays.

[0067] Nucleic acid probes may be generated using techniques which are well known to those of skill in the art (see, e.g., Sambrook et al., Molecular Cloning: A Laboratory Manual (2nd ed.), Vols. 1-3, Cold Spring Harbor Laboratory, (1989), or Current Protocols in Molecular Biology, F. Ausubel et al., ed. Greene Publishing and Wiley-Interscience, New York (1987).

[0068] In order to measure the hybridization of a nucleic acid probe to a target sequence in a biological sample, the probe is preferably labeled with a detectable label. In preferred embodiments, the probe further comprises a label group attached thereto and able to be detected. Detectable labels suitable for use in the present invention include any composition detectable by spectroscopic, photochemical, biochemical, immunochemical, electrical, optical or chemical means. Useful labels in the present invention include biotin for staining with labeled streptavidin conjugate, magnetic beads (e.g., DynabeadsTM), fluorescent dyes (e.g., fluorescein, texas red, rhodamine, green fluorescent protein, and the like), radiolabels (e.g.,³H, ¹²⁵I, 35S, ¹⁴C, or ³²P), enzymes (e.g., horse radish peroxidase, alkaline phosphatase and others commonly used in an ELISA), and colorimetric labels such as colloidal gold or colored glass or plastic (e.g., polystyrene, polypropylene, latex, etc.) beads. Patents teaching the use of such labels include U.S. Pat. Nos. 3,817,837; 3,850,752; 3,939,350; 3,996,345; 4,277,437; 4,275,149; and 4,366,241.

[0069] Means of detecting such labels are well known to those of skill in the art. Thus, for example, radiolabels may be detected using photographic film or scintillation counters, fluorescent markers may be detected using a photodetector to detect emitted light. Enzymatic labels are typically detected by providing the enzyme with a substrate and detecting the reaction product produced by the action of the enzyme on the substrate, and colorimetric labels are detected by simply visualizing the colored label.

[0070] The labels may be incorporated into a nucleic acid probe by any of a number of means well known to those of skill in the art. However, in a preferred embodiment, the label is simultaneously incorporated into the probe during an amplification step in the preparation of the probe polynucleotides. Thus, for example, polymerase chain reaction (PCR), or other amplification reaction, with labeled primers or labeled nucleotides will provide a labeled amplification product, and thus a labeled probe.

[0071] Alternatively, a label may be added directly to the probe. Means of attaching labels to polynucleotides are well known to those of skill in the art and include, for example nick translation or end-labeling (e.g. with a labeled RNA) and subsequent attachment (ligation) of a polynucleotide linker joining the sample polynucleotide to a label (e.g., a fluorophore).

[0072] In a preferred embodiment, the fluorescent modifications are by cyanine dyes e.g. Cy-3/Cy-5 dUTP, Cy-3/Cy-5 dCTP (Amersham Pharmacia) or alexa dyes (Khan, J., Simon, R., Bittner, M., Chen, Y., Leighton, S. B., Pohida, T., Smith, P. D., Jiang, Y., Gooden, G. C., Trent, J. M. & Meltzer, P. S. (1998) Cancer Res. 58, 50095013.).

V Polynucleotide Composition

[0073] Full-length cDNA molecules comprising the disclosed nucleic acids of the marker sequences, useful for the generation of probes, primers, or for transcription to produce the protein of the marker sequences, or antibodies thereto may be obtained as follows. The nucleic acid sequences of the marker sequences or a portion thereof comprising at least approximately 8, preferably about 12, preferably about 15, preferably about 25, more preferably about 40 nucleotides up to the full length of the sequence of SEQ ID NOs: 1-93, or a sequence complementary thereto, may be used as a hybridization probe to detect hybridizing members of a cDNA library using probe design methods, cloning methods, and clone selection techniques as described in U.S. Pat. No. 5,654,173, “Secreted Proteins and Polynucleotides Encoding Them,” incorporated herein by reference. Libraries of cDNA may be made from selected tissues, such as normal or tumor tissue, or from tissues of a mammal treated with, for example, a pharmaceutical compound. Preferably, the tissue is the same as that used to generate the nucleic acids, as both the nucleic acid and the cDNA represent expressed genes. Alternatively, many cDNA libraries are available commercially. (Sambrook et al., Molecular Cloning: A Laboratory Manual, 2nd Ed. (Cold Spring Harbor Press, Cold Spring Harbor, N.Y. 1989). The choice of cell type for library construction may be made after the identity of the protein encoded by the nucleic acid-related gene is known. This will indicate which tissue and cell types are likely to express the related gene, thereby containing the mRNA for generating the cDNA.

[0074] Members of the library that are larger than the nucleic acid, and preferably that contain the whole sequence of the native message, may be obtained. To confirm that the entire cDNA has been obtained, RNA protection experiments may be performed as follows. Hybridization of a full-length cDNA to an mRNA may protect the RNA from RNase degradation. If the cDNA is not full length, then the portions of the mRNA that arc not hybridized may be subject to RNase degradation. This may be assayed, as is known in the art, by changes in electrophoretic mobility on polyacrylamide gels, or by detection of released monoribonucleotides. Sambrook et al., Molecular Cloning: A Laboratory Manual, 2nd Ed. (Cold Spring Harbor Press, Cold Spring Harbor, N.Y. 1989). In order to obtain additional sequences 5′ to the end of a partial cDNA, 5′ RACE (PCR Protocols: A Guide to Methods and Applications (Academic Press, Inc. 1990)) may be performed.

[0075] Genomic DNAs of the marker sequences may be isolated using nucleic acids in a manner similar to the isolation of full-length cDNAs. Briefly, the nucleic acids, or portions thereof, may be used as probes to libraries of genomic DNA. Preferably, the library is obtained from the cell type that was used to generate the nucleic acids. Most preferably, the genomic DNA is obtained from the biological material described herein in the Example. Such libraries may be in vectors suitable for carrying large segments of a genome, such as PI or YAC, as described in detail in Sambrook et al., pages 9.4-9.30. In addition, genomic sequences can be isolated from human BAC libraries, which are commercially available from Research Genetics, Inc., Huntville, Ala., USA, for example. In order to obtain additional 5′ or 3′ sequences, chromosome walking may be performed, as described in Sambrook et al., such that adjacent and overlapping fragments of genomic DNA are isolated. These may be mapped and pieced together, as is known in the art, using restriction digestion enzymes and DNA ligase.

[0076] Using the nucleic acids of the invention, corresponding full length genes can be isolated using both classical and PCR methods to construct and probe cDNA libraries. Using either method, Northern blots, preferably, may be performed on a number of cell types to determine which cell lines express the gene of interest at the highest rate.

[0077] Classical methods of constructing cDNA libraries in Sambrook et al., supra. With these methods, cDNA can be produced from mRNA and inserted into viral or expression vectors. Typically, libraries of mRNA comprising poly(A) tails can be produced with poly(T) primers. Similarly, cDNA libraries can be produced using the instant marker sequences or portions thereof as primers.

[0078] PCR methods may be used to amplify the members of a cDNA library that comprise the desired insert. In this case, the desired insert may contain sequence from the full length cDNA that corresponds to the sequence encoding Regla. Such PCR methods include gene trapping and RACE methods.

[0079] Gene trapping may entail inserting a member of a cDNA library into a vector. The vector then may be denatured to produce single stranded molecules. Next, a substrate-bound probe, such as biotinylated oligonucleotide, may be used to trap cDNA inserts of interest. Biotinylated probes can be linked to an avidin-bound solid substrate. PCR methods can be used to amplify the trapped cDNA. To trap sequences corresponding to the full length genes, the labeled probe sequence may be based on the nucleic acid of SEQ ID NOs: 1-93, or a sequence complementary thereto. Random primers or primers specific to the library vector can be used to amplify the trapped cDNA. Such gene trapping techniques are described in Gruber et al., PCT WO 95/04745 and Gruber et al., U.S. Pat. No. 5,500,356. Kits are commercially available to perform gene trapping experiments from, for example, Life Technologies, Gaithersburg, Md., USA.

[0080] “Rapid amplification of cDNA ends,” or RACE, is a PCR method of amplifying cDNAs from a number of different RNAs. The cDNAs may be ligated to an oligonucleotide linker and amplified by PCR using two primers. One primer may be based on sequence from the instant nucleic acids, for which full length sequence is desired, and a second primer may comprise a sequence that hybridizes to the oligonucleotide linker to amplify the cDNA. A description of this method is reported in PCT Pub. No. WO 97/19110.

[0081] In preferred embodiments of RACE, a common primer may be designed to anneal to an arbitrary adaptor sequence ligated to cDNA ends (Apte and Siebert, Biotechniques 15:890-893 (1993); Edwards et al., Nuc. Acids Res. 19:5227-5232 (1991)). When a single gene-specific RACE primer is paired with the common primer, preferential amplification of sequences between the single gene specific primer and the common primer occurs. Commercial cDNA pools modified for use in RACE are available.

[0082] Once the full-length cDNA or gene is obtained, DNA encoding variants can be prepared by site-directed mutagenesis, described in detail in Sambrook 15.3-15.63. The choice of codon or nucleotide to be replaced can be based on the disclosure herein on optional changes in amino acids to achieve altered protein structure and/or function.

[0083] As an alternative method to obtaining DNA or RNA from a biological material, such as serum, nucleic acid comprising nucleotides having the sequence of one or more nucleic acids of the invention can be synthesized. Thus, the invention encompasses nucleic acid molecules ranging in length from about 8 nucleotides (corresponding to at least 12 contiguous nucleotides which hybridize under stringent conditions to or are at least 80% identical to the nucleic acid sequence of SEQ ID NOs: 1-93, or a sequence complementary thereto) up to a maximum length suitable for one or more biological manipulations, including replication and expression, of the nucleic acid molecule. The invention includes but is not limited to (a) nucleic acid comprising the size of the full marker genes, or a sequence complementary thereto; (b) the nucleic acid of(a) also comprising at least one additional gene, operably linked to permit expression of a fusion protein; (c) an expression vector comprising (a) or (b); (d) a plasmid comprising (a) or (b); and (e) a recombinant viral particle comprising (a) or (b).

[0084] The sequence of a nucleic acid of the present invention is not limited and can be any sequence of A, T, G, and/or C (for DNA) and A, U, G, and/or C (for RNA) or modified bases thereof, including inosine and pseudouridine. The choice of sequence will depend on the desired function and can be dictated by coding regions desired, the intron-like regions desired, and the regulatory regions desired.

[0085] In various embodiments described above, the polynucleotides of the present invention can be modified at the base moiety, sugar moiety, or phosphate backbone to improve the stability, hybridization, or solubility of the molecule. For example, detectable markers (avidin, biotin, radioactive elements, fluorescent tags and dyes, energy transfer labels, energy-emitting labels, binding partners, etc.) or moieties which improve hybridization, detection, and/or stability can be attached to the polynucleotides. The polynucleotides can also be attached to solid supports, e.g., nitrocellulose, magnetic or paramagnetic microspheres (e.g., as described in U.S. Pat. Nos. 5,411,863; 5,543,289; for instance, comprising ferromagnetic, super-magnetic, paramagnetic, superparamagnetic, iron oxide and polysaccharide), nylon, agarose, diazotized cellulose, latex solid microspheres, polyacrylamides, etc., according to a desired method. See, e.g., U.S. Pat. Nos. 5,470,967, 5,476,925, and 5,478,893.

[0086] Polynucleotide according to the present invention can be labeled according to any desired method. The polynucleotide can be labeled using radioactive tracers such as ³²P, ³⁵S, ³H, or ¹⁴C, to mention some commonly used tracers. The radioactive labeling can be carried out according to any method, such as, for example, terminal labeling at the 3′ or 5′ end using a radiolabeled nucleotide, polynucleotide kinase (with or without dephosphorylation with a phosphatase) or a ligase (depending on the end to be labeled). A non-radioactive labeling can also be used, combining a polynucleotide of the present invention with residues having immunological properties (antigens, haptens), a specific affinity for certain recompounds (ligands), properties enabling detectable enzyme reactions to be completed (enzymes or coenzymes, enzyme substrates, or other substances involved in an enzymatic reaction), or characteristic physical properties, such as fluorescence or the emission or absorption of light at a desired wavelength, etc.

VI Vectors and Host Cells

[0087] The present invention further provides vectors and plasmids useful for directing the expression of marker sequences, and further provides host cells which express the vectors and plasmids provided herein. Nucleic acid sequences useful for the expression from a vector or plasmid as described below include, but are not limited to any nucleic acid or gene sequence identified as being differentially regulated by the methods described above, and further include therapeutic nucleic acid molecules, such as antisense molecules. The host cell may be any prokaryotic or eukaryotic cell. Ligating the polynucleotide sequence into a gene construct, such as an expression vector, and transforming or transfecting into hosts, either eukaryotic (yeast, avian, insect or mammalian) or prokaryotic (bacterial cells), are standard procedures well known in the art.

[0088] Vectors

[0089] There is a wide array of vectors known and available in the art that are useful for the expression of differentially expressed nucleic acid molecules according to the invention. The selection of a particular vector clearly depends upon the intended use the polypeptide encoded by the differentially expressed nucleic acid. For example, the selected vector must be capable of driving expression of the polypeptide in the desired cell type, whether that cell type be prokaryotic or eukaryotic. Many vectors comprise sequences allowing both prokaryotic vector replication and eukaryotic expression of operably linked gene sequences.

[0090] Vectors useful according to the invention may be autonomously replicating, that is, the vector, for example, a plasmid, exists extrachromosomally and its replication is not necessarily directly linked to the replication of the host cell's genome. Alternatively, the replication of the vector may be linked to the replication of the host's chromosomal DNA, for example, the vector may be integrated into the chromosome of the host cell as achieved by retroviral vectors.

[0091] Vectors useful according to the invention preferably comprise sequences operably linked to the sequence of interest (e.g., the marker sequences) that permit the transcription and translation of the sequence. Sequences that permit the transcription of the linked sequence of interest include a promoter and optionally also include an enhancer element or elements permitting the strong expression of the linked sequences. The term “transcriptional regulatory sequences” refers to the combination of a promoter and any additional sequences conferring desired expression characteristics (e.g., high level expression, inducible expression, tissue- or cell-type-specific expression) on an operably linked nucleic acid sequence.

[0092] The selected promoter may be any DNA sequence that exhibits transcriptional activity in the selected host cell, and may be derived from a gene normally expressed in the host cell or from a gene normally expressed in other cells or organisms. Examples of promoters include, but are not limited to the following: A) prokaryotic promoters—E. coli lac, tac, or trp promoters, lambda phage P_{R} or P_{L} promoters, bacteriophage T7, T3, Sp6 promoters, B. subtilis alkaline protease promoter, and the B. stearothermophilus maltogenic amylase promoter, etc.; B) eukaryotic promoters—yeast promoters, such as GAL1, GAL4 and other glycolytic gene promoters (see for example, Hitzeman et al., 1980, J. Biol. Chem. 255: 12073-12080; Alber & Kawasaki, 1982, J. Mol. Appl. Gen. 1: 419-434), LEU2 promoter (Martinez-Garcia et al., 1989, Mol Gen Genet. 217: 464-470), alcohol dehydrogenase gene promoters (Young et al., 1982, in Genetic Engineering of Microorganisms for Chemicals, Hollaender et al., eds., Plenum Press, NY), or the TPI1 promoter (U.S. Pat. No. 4,599,311); insect promoters, such as the polyhedrin promoter (U.S. Pat. No. 4,745,051; Vasuvedan et al., 1992, FEBS Lett. 311: 7-11), the P10 promoter (Vlak et al., 1988, J. Gen. Virol. 69: 765-776), the Autographa californica polyhedrosis virus basic protein promoter (EP 397485), the baculovirus immediate-early gene promoter gene 1 promoter (U.S. Pat. Nos. 5,155,037 and 5,162,222), the baculovirus 39K delayed-early gene promoter (also U.S. Pat. Nos. 5,155,037 and 5,162,222) and the OpMNPV immediate early promoter 2; mammalian promoters—the SV40 promoter (Subramani et al., 1981, Mol. Cell. Biol. 1: 854-864), metallothionein promoter (MT-1; Palmiter et al., 1983, Science 222: 809-814), adenovirus 2 major late promoter (Yu et al.,1984, Nucl. Acids Res. 12: 9309-21), cytomegalovirus (CMV) or other viral promoter (Tong et al., 1998, Anticancer Res. 18: 719-725), or even the endogenous promoter of a gene of interest in a particular cell type.

[0093] A selected promoter may also be linked to sequences rendering it inducible or tissue-specific. For example, the addition of a tissue-specific enhancer element upstream of a selected promoter may render the promoter more active in a given tissue or cell type. Alternatively, or in addition, inducible expression may be achieved by linking the promoter to any of a number of sequence elements permitting induction by, for example, thermal changes (temperature sensitive), chemical treatment (for example, metal ion- or IPTG-inducible), or the addition of an antibiotic inducing compound (for example, tetracycline).

[0094] Regulatable expression is achieved using, for example, expression systems that are drug inducible (e.g., tetracycline, rapamycin or hormone-inducible). Drug-regulatable promoters that are particularly well suited for use in mammalian cells include the tetracycline regulatable promoters, and glucocorticoid steroid-, sex hormone steroid-, ecdysone-, lipopolysaccharide (LPS)- and isopropylthiogalactoside (IPTG)-regulatable promoters. A regulatable expression system for use in mammalian cells should ideally, but not necessarily, involve a transcriptional regulator that binds (or fails to bind) nonmammalian DNA motifs in response to a regulatory agent, and a regulatory sequence that is responsive only to this transcriptional regulator.

[0095] Tissue-specific promoters may also be used to advantage in differentially expressed sequence-encoding constructs of the invention. A wide variety of tissue-specific promoters is known. As used herein, the term “tissue-specific” means that a given promoter is transcriptionally active (i.e., directs the expression of linked sequences sufficient to permit detection of the polypeptide product of the promoter) in less than all cells or tissues of an organism. A tissue specific promoter is preferably active in only one cell type, but may, for example, be active in a particular class or lineage of cell types (e.g., hematopoietic cells). A tissue specific promoter useful according to the invention comprises those sequences necessary and sufficient for the expression of an operably linked nucleic acid sequence in a manner or pattern that is essentially the same as the manner or pattern of expression of the gene linked to that promoter in nature. The following is a non-exclusive list of tissue specific promoters and literature references containing the necessary sequences to achieve expression characteristic of those promoters in their respective tissues; the entire content of each of these literature references is incorporated herein by reference. Examples of tissue specific promoters useful in the present invention are as follows:

[0096] Bowman et al., 1995 Proc. Natl. Acad. Sci. USA 92,12115-12119 describe a brain-specific transferrin promoter; the synapsin I promoter is neuron specific (Schoch et al., 1996 J. Biol. Chem. 271, 3317-3323); the nestin promoter is post-mitotic neuron specific (Uetsuki et al., 1996 J. Biol. Chem. 271, 918-924); the neurofilament light promoter is neuron specific (Charron et al., 1995 J. Biol. Chem. 270, 30604-30610); the acetylcholine receptor promoter is neuron specific (Wood et al., 1995 J. Biol. Chem. 270, 30933-30940); and the potassium channel promoter is high-frequency firing neuron specific (Gan et al., 1996 J. Biol. Chem 271, 5859-5865). Any tissue specific transcriptional regulatory sequence known in the art may be used to advantage with a vector encoding a differentially expressed nucleic acid sequence obtained from an animal subjected to pain.

[0097] In addition to promoter/enhancer elements, vectors useful according to the invention may further comprise a suitable terminator. Such terminators include, for example, the human growth hormone terminator (Palmiter et al., 1983, supra), or, for yeast or fungal hosts, the TPI1 (Alber & Kawasaki, 1982, supra) or ADH3 terminator (McKnight et al., 1985, EMBO J. 4: 2093-2099).

[0098] Vectors useful according to the invention may also comprise polyadenylation sequences (e.g., the SV40 or Ad5E1b poly(A) sequence), and translational enhancer sequences (e.g., those from Adenovirus VA RNAs). Further, a vector useful according to the invention may encode a signal sequence directing the recombinant polypeptide to a particular cellular compartment or, alternatively, may encode a signal directing secretion of the recombinant polypeptide.

[0099] a. Plasmid Vectors.

[0100] Any plasmid vector that allows expression of a coding sequence of interest (e.g., the coding sequence of Reg1α)in a selected host cell type is acceptable for use according to the invention. A plasmid vector useful in the invention may have any or all of the above-noted characteristics of vectors useful according to the invention. Plasmid vectors useful according to the invention include, but are not limited to the following examples: Bacterial—pQE70, pQE60, pQE-9 (Qiagen) pBs, phagescript, psiX174, pBluescript SK, pBsKS, pNH8a, pNH16a, pNH18a, pNH46a (Stratagene); pTrc99A, pKK223-3, pKK233-3, pDR540, and pRIT5 (Pharmacia); Eukaryotic—pWLneo, pSV2cat, pOG44, pXT1, pSG (Stratagene) pSVK3, pBPV, pMSG, and pSVL (Pharmacia). However, any other plasmid or vector may be used as long as it is replicable and viable in the host.

[0101] b. Bacteriophage Vectors.

[0102] There are a number of well known bacteriophage-derived vectors useful according to the invention. Foremost among these are the lambda-based vectors, such as Lambda Zap II or Lambda-Zap Express vectors (Stratagene) that allow inducible expression of the polypeptide encoded by the insert. Others include filamentous bacteriophage such as the M13-based family of vectors.

[0103] c. Viral Vectors.

[0104] A number of different viral vectors are useful according to the invention, and any viral vector that permits the introduction and expression of one or more of the polynucleotides of the invention in cells is acceptable for use in the methods of the invention. Viral vectors that can be used to deliver foreign nucleic acid into cells include but are not limited to retroviral vectors, adenoviral vectors, adeno-associated viral vectors, herpesviral vectors, and Semliki forest viral (alphaviral) vectors. Defective retroviruses are well characterized for use in gene transfer (for a review see Miller, A. D. (1990) Blood 76:271). Protocols for producing recombinant retroviruses and for infecting cells in vitro or in vivo with such viruses can be found in Current Protocols in Molecular Biology, Ausubel, F. M. et al. (eds.) Greene Publishing Associates, (1989), Sections 9.10-9.14, and other standard laboratory manuals.

[0105] In addition to retroviral vectors, Adenovirus can be manipulated such that it encodes and expresses a gene product of interest but is inactivated in terms of its ability to replicate in a normal lytic viral life cycle (see for example Berkner et al., 1988, BioTechniques 6:616; Rosenfeld et al., 1991, Science 252:431-434; and Rosenfeld et al., 1992, Cell 68:143-155). Suitable adenoviral vectors derived from the adenovirus strain Ad type 5 dl324 or other strains of adenovirus (e.g., Ad2, Ad3, Ad7 etc.) are well known to those skilled in the art. Adeno-associated virus (AAV) is a naturally occurring defective virus that requires another virus, such as an adenovirus or a herpes virus, as a helper virus for efficient replication and a productive life cycle. (For a review see Muzyczka et al., 1992, Curr. Topics in Micro. and Immunol. 158:97-129). An AAV vector such as that described in Traschin et al. (1985, Mol. Cell. Biol. 5:3251-3260) can be used to introduce nucleic acid into cells. A variety of nucleic acids have been introduced into different cell types using AAV vectors (see, for example, Hermonat et al., 1984, Proc. Natl. Acad. Sci. USA 81: 6466-6470; and Traschin et al., 1985, Mol. Cell. Biol. 4: 2072-2081).

[0106] Host Cells

[0107] Any cell into which a recombinant vector carrying a gene of interest (e.g., a sequence encoding the marker sequences) may be introduced and wherein the vector is permitted to drive the expression of the peptide encoded by the differentially expressed sequence is useful according to the invention. Any cell in which a differentially expressed molecule of the invention may be expressed and preferably detected is a suitable host, wherein the host cell is preferably a mammalian cell and more preferably a human cell. Vectors suitable for the introduction of nucleic acid sequences to host cells from a variety of different organisms, both prokaryotic and eukaryotic, are described herein above or known to those skilled in the art.

[0108] Host cells may be prokaryotic, such as any of a number of bacterial strains, or may be eukaryotic, such as yeast or other fungal cells, insect or amphibian cells, or mammalian cells including, for example, rodent, simian or human cells. Cells may be primary cultured cells, for example, primary human fibroblasts or keratinocytes, or may be an established cell line, such as NIH3T3, 293T or CHO cells. Further, mammalian cells useful in the present invention may be phenotypically normal or oncogenically transformed. It is assumed that one skilled in the art can readily establish and maintain a chosen host cell type in culture.

[0109] Introduction of Vectors to Host Cells.

[0110] Vectors useful in the present invention may be introduced to selected host cells by any of a number of suitable methods known to those skilled in the art. For example, vector constructs may be introduced to appropriate bacterial cells by infection, in the case of E. coli bacteriophage vector particles such as lambda or M13, or by any of a number of transformation methods for plasmid vectors or for bacteriophage DNA. For example, standard calcium-chloride-mediated bacterial transformation is still commonly used to introduce naked DNA to bacteria (Sambrook et al., 1989, Molecular Cloning, A Laboratory Manual, Cold Spring Harbor Laboratory Press, Cold Spring Harbor, N.Y.), but electroporation may also be used (Ausubel et al., 1988, Current Protocols in Molecular Biology, (John Wiley & Sons, Inc., NY, N.Y.)).

[0111] For the introduction of vector constructs to yeast or other fungal cells, chemical transformation methods are generally used (e.g. as described by Rose et al., 1990, Methods in Yeast Genetics, Cold Spring Harbor Laboratory Press, Cold Spring Harbor, N.Y.). For transformation of S. cerevisiae, for example, the cells are treated with lithium acetate to achieve transformation efficiencies of approximately 10⁴ colony-forming units (transformed cells)/μg of DNA. Transformed cells are then isolated on selective media appropriate to the selectable marker used. Alternatively, or in addition, plates or filters lifted from plates may be scanned for GFP fluorescence to identify transformed clones.

[0112] For the introduction of vectors comprising a sequence of interest to mammalian cells, the method used will depend upon the form of the vector. Plasmid vectors may be introduced by any of a number of transfection methods, including, for example, lipid-mediated transfection (“lipofection”), DEAE-dextran-mediated transfection, electroporation or calcium phosphate precipitation. These methods are detailed, for example, in Current Protocols in Molecular Biology (Ausubel et al., 1988, John Wiley & Sons, Inc., NY, N.Y.).

[0113] Lipofection reagents and methods suitable for transient transfection of a wide variety of transformed and non-transformed or primary cells are widely available, making lipofection an attractive method of introducing constructs to eukaryotic, and particularly mammalian cells in culture. For example, LipofectAMINE™ (Life Technologies) or LipoTaxi™ (Stratagene) kits are available. Other companies offering reagents and methods for lipofection include Bio-Rad Laboratories, CLONTECH, Glen Research, InVitrogen, JBL Scientific, MBI Fermentas, PanVera, Promega, Quantum Biotechnologies, Sigma-Aldrich, and Wako Chemicals USA.

[0114] Following transfection with a vector of the invention, eukaryotic (e.g., human) cells successfully incorporating the construct (intra- or extrachromosomally) may be selected, as noted above, by either treatment of the transfected population with a selection agent, such as an antibiotic whose resistance gene is encoded by the vector, or by direct screening using, for example, FACS of the cell population or fluorescence scanning of adherent cultures. Frequently, both types of screening may be used, wherein a negative selection is used to enrich for cells taking up the construct and FACS or fluorescence scanning is used to further enrich for cells expressing differentially expressed polynucleotides or to identify specific clones of cells, respectively. For example, a negative selection with the neomycin analog G418 (Life Technologies, Inc.) may be used to identify cells that have received the vector, and fluorescence scanning may be used to identify those cells or clones of cells that express the vector construct to the greatest extent.

VII Polypeptides

[0115] One aspect of the present invention pertains to isolated polypeptides which correspond to individual marker sequences of the present invention, and biologically active portions thereof, as well as polypeptide fragments suitable for use as immunogens to raise antibodies directed against a polypeptide encoded by a nucleic acid marker sequence of the present invention. In one embodiment, the native polypeptide encoded by a marker sequence can be isolated from cells or tissue sources by an appropriate purification scheme using standard protein purification techniques. In another embodiment, polypeptides encoded by a nucleic acid marker sequence of the invention are produced by recombinant DNA techniques. Alternative to recombinant expression, a polypeptide encoded by a nucleic acid marker sequence of the invention can be synthesized chemically using standard peptide synthesis techniques.

[0116] An “isolated” or “purified” protein or biologically active portion thereof is substantially free of cellular material or other contaminating proteins from the cell or tissue source from which the protein is derived, or substantially free of chemical precursors or other chemicals when chemically synthesized. The language “substantially free of cellular material” includes preparations of protein in which the protein is separated from cellular components of the cells from which it is isolated or recombinantly produced. Thus, protein that is substantially free of cellular material includes preparations of protein having less than about 30%, 20%, 10%, or 5% (by dry weight) of heterologous protein (also referred to herein as a “contaminating protein”). When the protein or biologically active portion thereof is recombinantly produced, it is also preferably substantially free of culture medium, i.e., culture medium represents less than about 20%, 10%, or 5% of the volume of the protein preparation. When the protein is produced by chemical synthesis, it is preferably substantially free of chemical precursors or other chemicals, i.e., it is separated from chemical precursors or other chemicals which are involved in the synthesis of the protein. Accordingly such preparations of the protein have less than about 30%, 20%, 10%, 5% (by dry weight) of chemical precursors or compounds other than the polypeptide of interest.

[0117] Biologically active portions of a polypeptide encoded by a nucleic acid marker sequence of the invention include polypeptides comprising amino acid sequences sufficiently identical to or derived from the amino acid sequence of the protein encoded by the nucleic acid marker sequence (e.g., the amino acid sequence listed in the GenBank and IMAGE Consortium database records described herein), which include fewer amino acids than the full length protein, and exhibit at least one activity of the corresponding full-length protein. Typically, biologically active portions comprise a domain or motif with at least one activity of the corresponding protein. A biologically active portion of a protein of the invention can be a polypeptide which is, for example, 10, 25, 50, 100 or more amino acids in length. Moreover, other biologically active portions, in which other regions of the protein are deleted, can be prepared by recombinant techniques and evaluated for one or more of the functional activities of the native form of a polypeptide of the invention.

[0118] The polypeptides may contain amino acid substitutions, deletions or insertions made on the basis of similarity in polarity, charge, solubility, hydrophobicity, and/or the amphipathic nature of the residues involved. Such substitutions may be conservative in nature when the substituted residue has structural or chemical properties similar to the original residue (e.g., replacement of leucine with isoleucine or valine) or they may be nonconservative when the replacement residue is radically different (e.g., a glycine replaced by a tryptophan). Computer programs included in LASERGENE software (DNASTAR, Madison, Wis.) and algorithms included in RasMol software (University of Massachusetts, Amherst, Mass.) may be used to help determine which and how many amino acid residues in a particular portion of the protein may be substituted, inserted, or deleted without abolishing biological or immunological activity.

[0119] The present invention also provides chimeric or fusion proteins corresponding to a marker sequence of the invention. As used herein, a “chimeric protein” or “fusion protein” comprises all or part (preferably a biologically active part) of a polypeptide encoded by a nucleic acid marker sequence of the invention operably linked to a heterologous polypeptide (i.e., a polypeptide other than the polypeptide encoded by the nucleic acid marker sequence). Within the fusion protein, the term “operably linked” is intended to indicate that the polypeptide of the invention and the heterologous polypeptide are fused in-frame to each other. The heterologous polypeptide can be fused to the amino-terminus or the carboxyl-terminus of the polypeptide of the invention.

[0120] One useful fusion protein is a GST fusion protein in which a polypeptide encoded by a nucleic acid marker sequence of the invention is fused to the carboxyl terminus of GST sequences. Such fusion proteins can facilitate the purification of a recombinant polypeptide of the invention.

[0121] In another embodiment, the fusion protein contains a heterologous signal sequence at its amino terminus. For example, the native signal sequence of a polypeptide encoded by a nucleic acid marker sequence of the invention can be removed and replaced with a signal sequence from another protein. For example, the gp67 secretory sequence the baculovirus envelope protein can be used as a heterologous signal sequence (Ausubel et al., ed., Current Protocols in Molecular Biology, John Wiley & Sons, NY, 1992). Other examples of eukaryotic heterologous signal sequences include the secretory sequences of melittin and human placental alkaline phosphatase (Stratagene; La Jolla, Calif.). In yet another example, useful prokaryotic heterologous signal sequences include the phoA secretory signal (Sambrook et al., supra) and the protein A secretory signal (Pharmacia Biotech; Piscataway, N.J.). A signal sequence can be used to facilitate secretion and isolation of the secreted protein or other proteins of interest.

[0122] In addition to recombinant production, proteins or portions thereof may be produced manually, using solid-phase techniques (Stewart et al. (1969) Solid-Phase Peptide Synthesis, W H Freeman, San Francisco, Calif.; Merrifield (1963) J Am Chem Soc 5:2149-2154), or using machines such as the 431A peptide synthesizer (Applied Biosystems (ABI), Foster City, Calif.). Proteins produced by any of the above methods may be used as pharmaceutical compositions to treat disorders associated with null or inadequate expression of the genomic sequence.

VIII Antibodies

[0123] Another aspect of the present invention pertains to antibodies directed to polypeptides and fragments thereof of the marker sequences of the present invention. An isolated polypeptide encoded by a nucleic acid marker sequence of the present invention, or fragment thereof, can be used as an immunogen to generate antibodies using standard techniques. Antibodies of the invention include, but are not limited to, polyclonal, monoclonal, multispecific, human, humanized, or chimeric antibodies, single chain antibodies, Fab fragments, Fv fragments F(ab′) fragments, fragments produced by a Fab expression library, anti-iodiotypic antibodies, or other epitope binding polypeptide. Preferably, an antibody, useful in the present invention for the detection of the individual marker sequences (and optionally at least one additional colon cancer-specific marker), is a human antibody or fragment thereof, including scFv, Fab, Fab′, F(ab′), Fd, single chain antibody, of Fv. Antibodies, useful in the invention may include a complete heavy or light chain constant region, or a portion thereof, or an absence thereof. An antibody, useful in the invention, may be obtained from an art recognized host, such as rabbit, mouse, rat, donkey, sheep, goat, guinea pig, camel, horse, or chicken. In one embodiment, an antibody, useful in the invention can be a humanized antibody, in which amino acids have been replaced in the non-antigen binding regions in order to more closely resemble a human antibody, while still retaining the original binding ability. Methods for making humanized antibodies are described in Teng et al., 1983, Proc. Natl. Acad. Sci. USA 80: 7308-7312; Kozbor et al., 1983, Immunology Today 4: 7279; Olsson et al., 1982, Meth. Enzymol. 92: 3-16; WO 92/06193; EP 0239400.

[0124] Antibodies of the present invention may be monospecific, dispecfic, trispecific, or of greater multispecificity. As such, the individual marker sequences useful for the detection of cancer maybe detected with separate antibodies, or may be detected with the same antibody. Alternatively, a multispecific antibody may exhibit different specificities for different epitopes on the same protein (e.g., different epitopes on a marker sequence). While specificity of an antibody useful in the present invention to one or more additional cancer-specific markers is preferred, antibodies that bind polypeptides with at least 95%, 90%, 85%, 75%, 65%, 55%, and at least 50% identity to a polypeptide useful in the present invention for the detection of cancer, particularly colon cancer are also included in the present invention. Also encompassed in the present invention are antibodies which bind to polypeptide molecules which are encoded by one or more nucleic acid sequences which are complementary to, or hybridize to the sequences of SEQ ID NOs: 1-93.

[0125] Antibodies of the present invention which are useful for the detection of colon cancer may further act as agonists or antagonists of the activity of the polypeptide molecules to which they bind, and may thus be useful as therapeutic molecules for the treatment or prevention of colon cancer.

[0126] An important, but not limiting, role of an antibody of the present invention is to provide for the purification, or detection of individual marker sequences in a patient sample, including both in vitro and in vivo detection methods. Antibodies useful for the detection of colon cancer as described herein do not have to be used alone, and can be fused to other polypeptides, including a heterologous polypeptide at the N- or C-terminus of the antibody polypeptide sequence. For example, an antibody useful in the present invention may be fused with a detectable label to facilitate detection of the antibody when bound to a target polypeptide. Methods for detectably labeling an antibody polypeptide are known to those of skill in the art.

[0127] For the production of antibodies useful in the present invention, various hosts including goats, rabbits, rats, mice, etc., may be immunized by injection with the protein products (or any portion, fragment, or oligonucleotide thereof which retains immunogenic properties) of the candidate genes of the invention. Depending on the host species, various adjuvants may be used to increase the immunological response. Such adjuvants include but are not limited to Freund's, mineral gels such as aluminum hydroxide, and surface active substances such as lysolecithin, pluronic polyols, polyanions, peptides, oil emulsions, keyhole limpet hemocyanin, and dinitrophenol. BCG (bacilli Calmette-Guerin) and Corynebacterium parvum are potentially useful human adjuvants.

[0128] Polyclonal antisera or monoclonal antibodies can be made using methods known in the art. A mammal such as a mouse, hamster, or rabbit, can be immunized with an immunogenic form of a marker polypeptide, fragment, modified form thereof, or variant form thereof. Alternatively, an animal may be immunized with an immunogenic form of one or more additional colon cancer-specific marker polypeptides. Techniques for conferring immunogenicity on such molecules include conjugation to carriers or other techniques well known in the art. For example, the immunogenic molecule can be administered in the presence of adjuvant as described above. Immunization can be monitored by detection of antibody titers in plasma or serum. Standard immunoassay procedures can be used with the immunogen as antigen to assess the levels and the specificity of antibodies. Following immunization, antisera can be obtained and, if desired, polyclonal antibodies isolated from the sera.

[0129] To produce monoclonal antibodies, antibody producing cells (lymphocytes) can be harvested from an immunized animal and fused with myeloma cells by standard somatic cell fusion procedures thus immortalizing these cells and yielding hybridoma cells. Such techniques are well known in the art (see, e.g., Kohler and Milstein, 1975, Nature 256: 495-497; Kozbor et al., 1983, Immunol. Today 4: 72, Cole et al., 1985, In Monoclonal Antibodies in Cancer Therapy, Allen R. Bliss, Inc., pages 77-96). Additionally, techniques described for the production of single-chain antibodies (U.S. Pat. No. 4,946,778) can be adapted to produce antibodies according to the invention.

[0130] Alternative to preparing monoclonal antibody-secreting hybridomas, a monoclonal antibody directed against a polypeptide of the invention can be identified and isolated by screening a recombinant combinatorial immunoglobulin library (e.g., an antibody phage display library) with the polypeptide of interest. Kits for generating and screening phage display libraries are commercially available (e.g., the Pharmacia Recombinant Phage Antibody System, Catalog No. 27-9400-01; and the Stratagene SurfZAP Phage Display Kit, Catalog No. 240612). Additionally, examples of methods and reagents particularly amenable for use in generating and screening antibody display library can be found in, for example, U.S. Pat. No. 5,223,409; PCT Publication No. WO 92/18619; PCT Publication No. WO 91/17271; PCT Publication No. WO 92/20791; PCT Publication No. WO 92/15679; PCT Publication No. WO 93/01288; PCT Publication No. WO 92/01047; PCT Publication No. WO 92/09690; PCT Publication No. WO 90/02809; Fuchs et al. (1991) Bio/Technology 9:1370-1372; Hay et al. (1992) Hum. Antibod. Hybridomas 3:81-85; Huse et al. (1989) Science 246:1275-1281; Griffiths et al. (1993) EMBO J. 12:725-734.

[0131] Antibody fragments which can specifically bind to a marker polypeptide of the present invention, or fragments thereof, modified forms thereof, and variants thereof, also may be generated by known techniques. For example, such fragments include, but are not limited to, F(ab′)₂ fragments which can be produced by pepsin digestion of the antibody molecule and the Fab fragments which can be generated by reducing the disulfide bridges of the F(ab′)₂ fragments. VH regions and FV regions can be expressed in bacteria using phage expression libraries (e.g., Ward et al., 1989, Nature 341: 544-546; Huse et al., 1989, Science 246: 1275-1281; McCafferty et al., 1990, Nature 348: 552-554).

[0132] Chimeric antibodies, i.e., antibody molecules that combine a non-human animal variable region and a human constant region also are within the scope of the invention. Chimeric antibody molecules include, for example, the antigen binding domain from an antibody of a mouse, rat, or other species, with human constant regions. Standard methods may be used to make chimeric antibodies containing the immunoglobulin variable region which recognizes the gene product of individual marker antigens of the invention (see, e.g., Morrison et al., 1985, Proc. Natl. Acad. Sci. USA 81: 6851; Takeda et al., 1985, Nature 314: 452; U.S. Pat. No. 4,816,567; U.S. Pat. No. 4,816,397).

[0133] Antibodies of the invention may be used as therapeutic agents in treating cancers. In a preferred embodiment, completely human antibodies of the invention are used for therapeutic treatment of human cancer patients, particularly those having cervical cancer. Such antibodies can be produced, for example, using transgenic mice which are incapable of expressing endogenous immunoglobulin heavy and light chains genes, but which can express human heavy and light chain genes. The transgenic mice are immunized in the normal fashion with a selected antigen, e.g., all or a portion of a polypeptide encoded by a nucleic acid marker sequences of the invention. Monoclonal antibodies directed against the antigen can be obtained using conventional hybridoma technology. The human immunoglobulin transgenes harbored by the transgenic mice rearrange during B cell differentiation, and subsequently undergo class switching and somatic mutation. Thus, using such a technique, it is possible to produce therapeutically useful IgG, IgA and IgE antibodies. For an overview of this technology for producing human antibodies, see Lonberg and Huszar (1995) Int. Rev. Immunol. 13:65-93). For a detailed discussion of this technology for producing human antibodies and human monoclonal antibodies and protocols for producing such antibodies, see, e.g., U.S. Pat. No. 5,625,126; U.S. Pat. No. 5,633,425; U.S. Pat. No. 5,569,825; U.S. Pat. No. 5,661,016; and U.S. Pat. No. 5,545,806. In addition, companies such as Abgenix, Inc. (Freemont, Calif.), can be engaged to provide human antibodies directed against a selected antigen using technology similar to that described above.

[0134] An antibody directed against a polypeptide encoded by a nucleic acid marker sequence of the invention (e.g., a monoclonal antibody) can be used to isolate the polypeptide by standard techniques, such as affinity chromatography or immunoprecipitation. Moreover, such an antibody can be used to detect the marker sequence (e.g., in a cellular lysate or cell supernatant) in order to evaluate the level and pattern of expression of the marker sequence. The antibodies can also be used diagnostically to monitor protein levels in tissues or body fluids (e.g. in an ovary-associated body fluid) as part of a clinical testing procedure, e.g., to, for example, determine the efficacy of a given treatment regimen. Detection can be facilitated by coupling the antibody to a detectable substance. Examples of detectable substances include various enzymes, prosthetic groups, fluorescent materials, luminescent materials, bioluminescent materials, and radioactive materials. Examples of suitable enzymes include horseradish peroxidase, alkaline phosphatase, beta.-galactosidase, or acetylcholinesterase; examples of suitable prosthetic group complexes include streptavidin/biotin and avidin/biotin; examples of suitable fluorescent materials include umbelliferone, fluorescein, fluorescein isothiocyanate, rhodamine, dichlorotriazinylamine fluorescein, dansyl chloride or phycoerythrin; an example of a luminescent material includes luminol; examples of bioluminescent materials include luciferase, luciferin, and aequorin, and examples of suitable radioactive material include ¹²⁵I, ¹³¹I, ³⁵S or ³H.

[0135] Further, an antibody (or fragment thereof) can be conjugated to a therapeutic moiety such as a cytotoxin, a therapeutic agent or a radioactive metal ion. A cytotoxin or cytotoxic agent includes any agent that is detrimental to cells. Examples include taxol, cytochalasin B, gramicidin D, ethidium bromide, emetine, mitomycin, etoposide, tenoposide, vincristine, vinblastine, colchicin, doxorubicin, daunorubicin, dihydroxy anthracin dione, mitoxantrone, mithramycin, actinomycin D, 1-dehydrotestosterone, glucocorticoids, procaine, tetracaine, lidocaine, propranolol, and puromycin and analogs or homologs thereof. Therapeutic agents include, but are not limited to, antimetabolites (e.g., methotrexate, 6-mercaptopurine, 6-thioguanine, cytarabine, 5-fluorouracil decarbazine), alkylating agents (e.g., mechlorethamine, thioepa chlorambucil, melphalan, carmustine (BSNU) and lomustine (CCNU), cyclothosphamide, busulfan, dibromomannitol, streptozotocin, mitomycin C, and cis-dichlorodiamine platinum (II) (DDP) cisplatin), anthracyclines (e.g., daunorubicin (formerly daunomycin) and doxorubicin), antibiotics (e.g., dactinomycin (formerly actinomycin), sup.bleomycin, mithramycin, and anthramycin (AMC)), and anti-mitotic agents (e.g., vincristine and vinblastine). Alternatively, an antibody can be conjugated to a second antibody to form an antibody heteroconjugate as described in U.S. Pat. No. 4,676,980.

[0136] Techniques for conjugating such therapeutic moiety to antibodies are well known, see, e.g., Arnon et al., “Monoclonal Antibodies For Immunotargeting Of Drugs In Cancer Therapy”, in Monoclonal Antibodies And Cancer Therapy, Reisfeld et al. (eds.), pp. 243-56 (Alan R. Liss, Inc. 1985); Hellstrom et al., “Antibodies For Drug Delivery”, in Controlled Drug Delivery (2nd Ed.), Robinson et al. (eds.), pp. 623-53 (Marcel Dekker, Inc. 1987); Thorpe, “Antibody Carriers Of Cytotoxic Agents In Cancer Therapy: A Review”, in Monoclonal Antibodies '84; Biological And Clinical Applications, Pinchera et al. (eds.), pp. 475-506 (1985); “Analysis, Results, And Future Prospective Of The Therapeutic Use Of Radiolabeled Antibody In Cancer Therapy”, in Monoclonal Antibodies For Cancer Detection And Therapy, Baldwin et al. (eds.), pp. 303-16 (Academic Press 1985), and Thorpe et al., “The Preparation And Cytotoxic Properties Of Antibody-Toxin Conjugates”, Immunol. Rev., 62:119-58 (1982).

IX Detection of the Marker Sequences

[0137] In one aspect, the expression levels of the differentially expressed marker sequences are determined in normal and cancer cells and/or tissue, especially the colon cancer cells and/or tissue. In general, the present invention relates to methods of detecting a differentially-expressed nucleic acid sequence in a sample comprising nucleic acid. Such methods can comprise one or more of the following steps in any effective order, e.g., contacting said sample with polynucleotide probes under conditions effective for said probe to hybridize specifically to the nucleic acids of the marker sequences in said sample, and detecting the presence or absence of the nucleic acid marker sequences in said sample. In one preferred embodiment, said probes are polynucleotides designed to identify the marker sequences either in Table 1 or Table 2. The detection method can be applied to any sample, e.g., cultured primary, secondary, or established cell lines, tissue biopsy, blood, urine, stool, cerebral spinal fluid, and other bodily fluids, for any purpose.

[0138] In one embodiment, the probes of the individual and/or combinations of the marker sequences are applied to the samples obtained from both the normal and colon cancer cell lines, and the presence of the marker sequences are detected with the methods describes herein. In another embodiment, the probes of the individual and/or combinations of the marker sequences are applied to the samples obtained from both the normal and colon cancer tissue, and the amount of the marker sequences are detected with the methods describes herein. For example, one determination assay can employ the over-expressed marker sequences in combination with an the over-expressed or an under-expressed marker sequences. Moreover, the determination assay can employ a panel of at least two, or at least three, or at least four or more marker sequences, selected from both the over-expressed and the under-expressed marker sequences.

[0139] The methods of detecting the presence of the marker sequences can be carried out by any effective process, e.g., by Northern blot analysis, polymerase chain reaction (PCR), reverse transcriptase PCR, RACE PCR, in situ hybridization, etc.. When PCR based techniques are used, two or more probes are generally used. One probe can be specific for a defined sequence which is characteristic of a selective polynucleotide, but the other probe can be specific for the selective polynucleotide, or specific for a more general sequence, e.g., a sequence such as polyA which is characteristic of mRNA, a sequence which is specific for a promoter, ribosome binding site, or other transcriptional features, a consensus sequence (e.g., representing a functional domain). For the former aspects, 5′ and 3′ probes (e.g., polyA, Kozak, etc.) are preferred which are capable of specifically hybridizing to the ends of transcripts. When PCR is utilized, the probes can also be referred to as “primers” in that they can prime a DNA polymerase reaction.

[0140] In addition to testing for the presence or absence of the marker polynucleotides, the present invention also relates to determining the amounts at which the marker sequences of the present invention are expressed in samples and determining the differential expression of such marker sequences in samples. Such methods can involve substantially the same steps as described above for presence/absence detection, e.g., contacting with probe, hybridizing, and detecting hybridized probe, but using more quantitative methods and/or comparisons to standards. The amount of hybridization between the probe and target can be determined by any suitable methods, e.g., PCR, RT-PCR, RACE PCR, Northern blot, polynucleotide microarrays, Rapid-Scan, etc., and includes both quantitative and qualitative measurements.

[0141] In one embodiment, reverse transcription PCR (RT-PCR) is performed using primers designed to specifically hybridize to a predetermined portion of the marker mRNA sequences isolated from a clinical sample. Generation of a PCR product by such a reaction is thus indicative of the presence of the marker sequences in the sample. The technique of designing primers for PCR amplification is well known in the art. Oligonucleotide primers and probes are about 5 to 100 nucleotides in length, ideally from about 17 to 40 nucleotides, although primers and probes of different length are of use. Primers for amplification are preferably about 17-25 nucleotides. Primers useful according to the invention are also designed to have a particular melting temperature (Tm) by the method of melting temperature estimation. Commercial programs, including Oligo™ (MBI, Cascade, CO), Primer Design and programs available on the internet, including Primer3 and Oligo Calculator can be used to calculate a Tm of a nucleic acid sequence useful according to the invention. Preferably, the Tm of an amplification primer useful according to the invention, as calculated for example by Oligo Calculator, is preferably between about 45 and 65° C. and more preferably between about 50 and 60° C. Preferably, the Tm of a probe useful according to the invention is 7° C. higher than the Tm of the corresponding amplification primers. It is preferred that, following generation of cDNA by RT-PCR, the cDNA fragment is cloned into an appropriate sequencing vector, such as a PCRII vector (TA cloning kit; Invitrogen). The identity of each cloned fragment is then confirmed by sequencing in both directions. It is expected that the sequence obtained from sequencing would be the same as the known sequences of the marker sequences as described herein.

[0142] Alternatively, the presence of mRNA sequences encoding the marker sequences may be detected by Northern analysis. Sequence confirmed cDNAs, that is, cDNAs encoding the marker sequences are used to produce ³²P-labeled cDNA probes using techniques well known in the art (see, for example, Ausubel, supra). Labeled probes for Northern analysis may also be produced using commercially available kits (Prime-It Kit, Stratagene, La Jolla, Calif.). Northern analysis of total RNA obtained from a clinical sample may be performed using classically described techniques. For example, total RNA samples are denatured with formaldehyde/formamide and run for two hours in a 1% agarose, MOPS-acetate-EDTA gel. RNA is then transferred to nitrocellulose membrane by upward capillary action and fixed by UV cross-linkage. Membranes are pre-hybridized for at least 90 minutes and hybridized overnight at 42° C. Post hybridization washes are performed as known in the art (Ausubel, supra). The membrane is then exposed to x-ray film overnight with an intensifying screen at −80° C. Labeled membranes are then visualized after exposure to film. The signal produced on the x-ray film by the radiolabeled cDNA probes can then be quantified using any technique known in the art, such as scanning the film and quantifying the relative pixel intensity using a computer program such as NIH Image (National Institutes of Health, Bethesda, Md.), wherein the detection of hybridization of a marker-specific probe to the clinical sample is indicative of the presence of the marker sequences and thus may be used to detect cancer such as colon cancer.

[0143] In an alternative embodiment, the presence and optionally the quantity of the marker sequences in a clinical sample may be determined using the Taqman™ (Perkin-Elmer, Foster City, Calif.) technique, which is performed with a transcript-specific antisense probe (i.e., a probe capable of specifically hybridizing to a marker sequence). This probe is specific for a marker sequence PCR product and is prepared with a quencher and fluorescent reporter probe complexed to the 5′ end of the oligonucleotide. Different fluorescent markers can be attached to different reporters, allowing for measurement of two products in one reaction (e.g., measurement of the marker sequence). When Taq DNA polymerase is activated, it cleaves off the fluorescent reporters by its 5′-to-3′ nucleolytic activity. The reporters, now free of the quenchers, fluoresce. The color change is proportional to the amount of each specific product and is measured by fluorometer; therefore, the amount of each color can be measured and the RT-PCR product can be quantified. The PCR reactions can be performed in 96 well plates so that samples derived from many individuals can be processed and measured simultaneously. The Taqman™ system has the additional advantage of not requiring gel electrophoresis and allows for quantification when used with a standard curve.

[0144] The marker sequence-specific antibodies described above may be used to detect the presence of one or more marker sequences in a biological sample by any method known in the art. The immunoassays which can be used include but are not limited to competitive and non-competitive assay systems using techniques such as western blots, radioimmunoassays, ELISA (enzyme linked immunosorbent assay),“sandwich” immunoassays, immunoprecipitation assays, precipitation reactions, gel diffusion precipitin reactions, immunodiffusion assays, agglutination assays, complement-fixation assays, immunoradiometric assays, fluorescent immunoassays, protein A immunoassays, to name but a few. Such assays are routine and well known in the art (see, e. g., Ausubel et al, eds, 1994, Current Protocols in Molecular Biology, Vol. 1, John Wiley & Sons, Inc., New York, which is incorporated by reference herein in its entirety). Exemplary immunoassays are described briefly below (but are not intended by way of limitation).

[0145] Immunoprecipitation protocols generally comprise lysing a population of cells in a lysis buffer such as RIPA buffer (1% NP-40 or Triton X-100,1% sodium deoxycholate, 0.1% SDS, 0.15 M NaCI, 0.01 M sodium phosphate at pH 7.2,1% Trasylol) supplemented with protein phosphatase and/or protease inhibitors (e. g., EDTA, PMSF, aprotinin, sodium vanadate), adding the antibody of interest to the cell lysate, incubating for a period of time (e. g., 1-4 hours) at 4 C., adding protein A and/or protein G sepharose beads to the cell lysate, incubating for about an hour or more at 4 C., washing the beads in lysis buffer and resuspending the beads in SDS/sample buffer. In the case of immunonprecipitation of a serum sample, however the above protocol is carried out absent the cell lysis step. The ability of the antibody to immunoprecipitate Regl a or TIMP1 (or other colon cancer marker) antigen can be assessed by, e. g., western blot analysis. The parameters that can be modified to increase the binding of the antibody to an antigen and decrease the background (e. g., preclearing the cell lysate with sepharose beads) are well known to those of skill in the art (Ausubel et al, supra).

[0146] The individual and/or the combinations of the marker sequences may be detected in a biological sample obtained from a patient using Western blot analysis. Briefly, Western blot analysis comprises preparing protein samples, electrophoresis of the protein samples in a polyacrylamide gel (e. g., 8%-20% SDS-PAGE), transferring the protein sample from the polyacrylamide gel to a membrane such as nitrocellulose, PVDF or nylon, blocking the membrane in blocking solution (e. g., PBS with 3% BSA or non-fat milk), washing the membrane in washing buffer (e. g., PBS-Tween 20), blocking the membrane with primary antibody (the antibody of interest) diluted in blocking buffer, washing the membrane in washing buffer, blocking the membrane with a secondary antibody (which recognizes the primary antibody, e. g., an antihuman antibody) conjugated to an enzymatic substrate (e. g., horseradish peroxidase or alkaline phosphatase) or radioactive molecule (e. g., 32P or 125I) diluted in blocking buffer, washing the membrane in wash buffer, and detecting the presence of the antigen. Methods for the optimization of such an analysis are well known in the art (Ausubel, et al., supra).

[0147] Alternatively, the presence of one or more cancer specific marker sequences in a clinical sample may be detected by ELISA. ELISAs comprise preparing antigen, coating the well of a 96 well microtiter plate (or other suitable container) with the antigen, adding the antibody of interest conjugated to a detectable compound such as an enzymatic substrate (e. g., horseradish peroxidase or alkaline phosphatase) to the well and incubating for a period of time, and detecting the presence of the antigen. In ELISAs the antibody of interest does not have to be conjugated to a detectable compound; instead, a second antibody (which recognizes the antibody of interest, that is, the antibody which will bind to a cancer-specific marker) conjugated to a detectable compound may be added to the well. Further, instead of coating the well with the antigen, the antibody may be coated to the well. In this case, a second antibody conjugated to a detectable compound may be added following the addition of the antigen of interest to the coated well. This method may be modified or optimized according techniques which are known to those of skill in the art.

[0148] The binding affinity of an antibody to an antigen and the off-rate of an antibody/antigen interaction can be determined by competitive binding assays. One example of such an assay is a radioimmunoassay comprising the incubation of labeled antigen (e. g., marker labeled with 3H or 125I) with an anti-marker antibody in the presence of increasing amounts of unlabeled antigen, and the detection of the antibody bound to the labeled antigen. The affinity of the antibody of interest for a particular antigen and the binding off-rates can be determined from the data by scatchard plot analysis. Competition with a second antibody can also be determined using radioimmunoassays. In this case, the antigen is incubated with antibody of interest conjugated to a labeled compound (e. g., 3H or 125I) in the presence of increasing amounts of an unlabeled second antibody.

[0149] Preferably, the above detection assays may be carried out using antibodies to detect the protein product encoded by a nucleic acid having the sequence of SEQ ID NOs:1-93, or a sequence complementary thereto. In addition, the above detection assays may be conducted using one or more antibodies which specifically recognize and bind to at least one cancer-specific marker. Accordingly, in one embodiment, the assay would include contacting the proteins of the test cell with an antibody specific for the gene product of a nucleic acid represented by SEQ ID NO:1-93, or a sequence complementary thereto, and determining the approximate amount of immunocomplex formation by the antibody and the proteins of the test cell, wherein a detection of such an immunocomplex is indicative of the presence of the antigen, and thus, permits the detection of colon cancer.

[0150] Immunoassays, useful in the present invention include those described above, and can also include both homogeneous and heterogeneous procedures such as fluorescence polarization immunoassay (FPIA), fluorescence immunoassay (FIA), enzyme immunoassay (EIA), and nephelometric inhibition immunoassay (NIA).

[0151] In another embodiment, the level of the encoded polypeptide product, i.e., the polypeptide product encoded by a nucleic acid sequence selected from the group consisting of SEQ ID NO:1-93, or a sequence complementary thereto, in a biological fluid (e.g., blood or urine) of a patient may be determined as a way of monitoring the level of expression of the marker nucleic acid sequence in cells of that patient. Such a method would include the steps of obtaining a sample of a biological sample from the patient, contacting the sample (or proteins from the sample) with an antibody specific for an encoded marker polypeptide, and determining the amount of immune complex formation by the antibody, with the amount of immune complex formation being indicative of the level of the marker encoded polypeptide product in the sample. This determination is particularly instructive when compared to the amount of immune complex formation by the same antibody in a control sample taken from a normal individual or in one or more samples previously or subsequently obtained from the same person.

[0152] In another embodiment, the method can be used to determine the amount of marker polypeptide present in a cell, which in turn can be correlated with progression of a hyperproliferative disorder, e.g., colon cancer. The level of the marker polypeptide can be used predictably to evaluate whether a sample of cells contains cells which are, or are predisposed towards becoming, transformed cells. Moreover, the subject method can be used to assess the phenotype of cells which are known to be transformed, the phenotyping results being useful in planning a particular therapeutic regimen. For instance, very high levels of the marker polypeptide in sample cells is a powerful diagnostic and prognostic marker for a cancer, such as colon cancer. The observation of marker polypeptide level can be utilized in decisions regarding, e.g., the use of more aggressive therapies.

X Diagnostic Assays

[0153] The determination of a detectable increase or decrease in the expression level of one or more marker sequences in a cancer patient compared to a normal patient provides a means of diagnosing or monitoring the patient's disease status, and/or patient response or benefit to cancer therapy. The present invention provides methods for detecting cancer, or alternatively, determining whether a subject is at risk for developing cancer by detecting the disclosed cancer-specific markers (i.e., the nucleic acid sequences of one or more nucleic acid sequences encoding the cancer specific marker and/or polypeptide sequences of one or more cancer specific markers) for the disease or condition encoded thereby. Examples of cancer include but not limited to, adenocarcinoma, lymphoma, blastoma, melanoma, sarcoma, and leukemia. More particularly, examples of cancer also include squamous cell cancer, small-cell lung cancer, non-small cell lung cancer, gastrointestinal cancer, Hodgkin's and non-Hodgkin's lymphoma, pancreatic cancer, glioblastoma, cervical cancer, ovarian cancer, liver cancer such as hepatic carcinoma and hepatoma, bladder cancer, breast cancer, colon cancer, colorectal cancer, endometrial carcinoma, salivary gland carcinoma, kidney cancer such as renal cell carcinoma and Wilms' tumors, basal cell carcinoma, melanoma, prostate cancer, vulval cancer, thyroid cancer, testicular cancer, esophageal cancer, and various types of head and neck cancer. Preferably, the cancers include breast, colon, and lung cancer. In a more preferred embodiment, the cancer is colon cancer, and the marker sequences are the ones comprising a nucleic acid sequence selected from the group consisting of SEQ ID NOs:1-93.

[0154] In clinical applications, human tissue samples can be screened for the presence and/or absence of the biomarkers identified herein. Such samples may comprise tissue samples, whole cells, cell lysates, or isolated nucleic acids, including, for example, needle biopsy cores, surgical resection samples, lymph node tissue, plasma, or serum. For example, these methods include obtaining a biopsy, which is optionally fractionated by cryostat sectioning to enrich tumor cells to about 80% of the total cell population. In certain embodiments, nucleic acids extracted from these samples may be amplified using techniques well known in the art. The levels of selected markers detected would be compared with statistically valid groups of metastatic, non-metastatic malignant, benign, or normal colon tissue samples.

[0155] In one embodiment, the diagnostic method comprises determining whether a subject has an abnormal mRNA or cDNA and/or protein level of the marker sequences. The method comprises using a nucleic acid probe to determine the expression level of the individual and/or the combinations of the marker sequences in a biological sample obtained from a patient. Specifically, the method comprises:
[0156] 1. Providing a nucleic acid probe comprising a nucleotide sequence at least about 8 nucleotides in length, at least about 12 nucleotides in length, preferably at least about 15 nucleotides, more preferably about 25 nucleotides, and most preferably at least about 40 nucleotides, and up to all or nearly all of the coding sequence which is complementary to a portion of the coding sequence of a nucleic acid sequence represented by SEQ ID NOs:1-93, or a sequence complementary thereto;
[0157] 2. Obtaining a clinical sample from a patient potentially comprising one or more nucleic acid marker sequences;
[0158] 3. Providing a second clinical sample from an individual known to not have colon cancer;
[0159] 4. Contacting the nucleic acid probe under stringent conditions with RNA of each of said first and second clinical samples (e.g., in a Northern blot or in situ hybridization assay); and
[0160] 5. Comparing (a) the amount of hybridization of the probe with RNA of the first clinical sample, with (b) the amount of hybridization of the probe with RNA of the second clinical sample; wherein a statistically difference (e.g., by at least 0.5 fold, at least 2 fold, at least 5 fold, at least 20 fold, or at least 50 fold) in the amount of hybridization with the RNA of the first clinical sample as compared to the amount of hybridization with the RNA of the second clinical sample is indicative of the presence of one or more marker sequences in the first clinical sample.

[0161] In one embodiment, the method comprises in situ hybridization with a probe derived from a given marker nucleic acid sequence, which nucleic acid sequence is represented by SEQ ID NO:1-93, or a sequence complementary thereto. The method comprises contacting the labeled hybridization probe with a sample of a given type of tissue potentially containing cancerous or pre-cancerous cells as well as normal cells, and determining whether the probe labels some cells of the given tissue type to a degree significantly different (e.g., by at least 0.5 fold, at least 2 fold, at least 5 fold, at least 20 fold, or at least 50 fold) than the degree to which it labels other cells of the same tissue type.

[0162] Determining by hybridization whether the target is differentially expressed (e.g., up-regulated or down-regulated) in the sample can also be accomplished by any effective means. For instance, the target's expression pattern in the sample can be compared to its pattern in a known control, such as in a normal tissue, or it can be compared to another target in the same sample. When a second sample is utilized for the comparison, it can be a sample of normal tissue that is known not to contain diseased cells. The comparison can be performed on samples which contain the same amount of RNA (such as polyadenylated RNA or total RNA), or, on RNA extracted from the same amounts of starting tissue. Such a second sample can also be referred to as a control or standard. Hybridization can also be compared to a second target in the same tissue sample. Experiments can be performed that determine a ratio between the target nucleic acid and a second nucleic acid (a standard or control), e.g., in a normal tissue. When the ratio between the target and control are substantially the same in a normal sample, the sample is determined or diagnosed not to contain cancer cells. However, if the ratio is at least 2 fold different between the normal and sample tissues, the sample is determined to contain cancer cells. The approaches can be combined, and one or more second samples, or second targets can be used. Any second target nucleic acid can be used as a comparison, including “housekeeping” genes, such as beta-actin, alcohol dehydrogenase, or any other gene whose expression does not vary depending upon the disease status of the cell.

[0163] Alternatively, the above diagnostic assays may be carried out using antibodies to detect the polypeptides encoded by the nucleic acid marker sequences, which nucleic acid sequences are represented by SEQ ID NOs:1-93, or a sequence complementary thereto. Preferably, the polypeptides have the sequence of one or more of SEQ ID NOs: 94-186. Accordingly, in one embodiment, the assay would include contacting the polypeptides of the test cell or tissue with one or more antibodies specific for the polypeptides represented by SEQ ID NOs: 94-186, and determining the approximate amount of immunocomplex formation by the antibodies and polypeptides of the test cell or tissue, wherein a statistically significant difference in the amount of the immunocomplex formed with the polypeptides of a test or tissue as compared to a normal cell or tissue is an indication that the test cell is cancerous or pre-cancerous. The term “significant difference” refers to a cell phenotype wherein the cell possesses a changed cellular amount of the marker polypeptide relative to a normal cell of similar tissue origin. For example, a cell may have either more or less than about 50%, 25%, 10%, or 5% of the marker polypeptide that a normal control cell. In particular, the assay evaluates the level of marker polypeptide in the test cells, and, preferably, compares the measured level with marker polypeptide detected in at least one control cell, e.g., a normal cell and/or a transformed cell of known phenotype.

[0164] In one embodiment, the assay is performed as a dot blot assay. The dot blot assay finds particular application where tissue samples are employed as it allows determination of the average amount of the marker polypeptide associated with a single cell by correlating the amount of marker polypeptide in a cell-free extract produced from a predetermined number of cells.

[0165] It is well established in the cancer literature that tumor cells of the same type (e.g., breast and/or colon tumor cells) may not show uniformly increased expression of individual oncogenes or uniformly decreased expression of individual tumor suppressor genes. There may also be varying levels of expression of a given marker sequence even between cells of a given type of cancer, further emphasizing the need for reliance on a battery of tests rather than a single test. Accordingly, in one aspect, the invention provides for a battery of tests utilizing a number of probes of the invention, in order to improve the reliability and/or accuracy of the diagnostic test.

XI Arrays

[0166] In one aspect, the present invention also provides a method wherein nucleic acid probes are immobilized on a DNA chip in an organized array. Oligonucleotides can be bound to a solid support by a variety of processes, including lithography. These nucleic acid probes comprise a nucleotide sequence at least about 8 nucleotides in length, preferably at least about 12 preferably at least about 15 nucleotides, more preferably at least about 25 nucleotides, and most preferably at least about 40 nucleotides, and up to all or nearly all of a sequence which is complementary to a portion of the coding sequence of a marker nucleic acid sequence represented by SEQ ID NO:1-93 and is differentially expressed in cancer cells, such as colon cancer cells. In some embodiments, the microarrays comprise at least 3, 4, 5, 6, 7, 8, 9, 10, 11, 12, 13, 14, or 15, or more nucleic acids that are complimentary to at least a portion of the coding sequences of the marker sequences comprising a nucleic acid sequence selected from the group consisting of SEQ ID NOs: 1-93. The present invention provides significant advantages over the available tests for various cancers, such as colon cancer, because it increases the reliability of the test by providing an array of nucleic acid markers on a single chip.

[0167] The method includes obtaining a biopsy, which is optionally fractionated by cryostat sectioning to enrich tumor cells to about 80% of the total cell population. The DNA or RNA is then extracted, amplified, and analyzed with a DNA chip to determine the presence of absence of the marker nucleic acid sequences.

[0168] In one embodiment, the nucleic acid probes are spotted onto a substrate in a two-dimensional matrix or array. Samples of nucleic acids can be labeled and then hybridized to the probes. Double-stranded nucleic acids, comprising the labeled sample nucleic acids bound to probe nucleic acids, can be detected once the unbound portion of the sample is washed away.

[0169] The probe nucleic acids can be spotted on substrates including glass, nitrocellulose, etc. The probes can be bound to the substrate by either covalent bonds or by non-specific interactions, such as hydrophobic interactions. The sample nucleic acids can be labeled using radioactive labels, fluorophores, chromophores, etc.

[0170] Techniques for constructing arrays and methods of using these arrays are described in EP No. 0 799 897; PCT No. WO 97/292 12; PCT No. WO 97127317; EP No. 0 785 280; PCT No. WO 97/02357; U.S. Pat. No. 5,593,839; U.S. Pat. No. 5,578,832; EP No. 0 728 520; U.S. Pat. No. 5,599,695; EP No. 0 721 016; U.S. Pat. No. 5,556,752; PCT No. WO 95/22058; and U.S. Pat. No. 5,631,734.

[0171] In another aspect, the present invention also provides a protein microarrays. Protein microarray technology, which is also known by other names including: protein chip technology and solid-phase protein array technology, is well known to those of ordinary skill in the art and is based on, but not limited to, obtaining an array of identified peptides or proteins on a fixed substrate, binding target molecules or biological constituents to the peptides, and evaluating such binding. See, e.g., G. MacBeath and S. L. Schreiber, “Printing Proteins as Microarrays for High-Throughput Function Determination,” Science 289(5485):1760-1763, 2000. In general, the protein microarrays include antigen-binding ligands such as antibodies or fragments thereof, fixed to a solid substrate, wherein the ligands specifically bind to the polypeptides encoded by the marker sequences of the present invention. In one embodiment, the protein microarrays further include at least one control polypeptide molecule. In some embodiments, the microarray comprises antibodies or antigen-binding fragments thereof, that bind specifically to least 2, 3, 4, 5, 6, 7, 8, 9, 10, 11, 12, 13, 14, 15, 16, 17, 18, 19, 20, 21, 22, 23, 24, 25, 26, 27, 28, 29, 30, 31, 32, 33, 34, 35, 36, 37, 38, 39, or 40 different polypeptides encoded by nucleic acid molecules comprising a nucleotide sequence selected from the group consisting of SEQ ID NOs: 1-93. In certain embodiment, the antibodies are monoclonal or polyclonal antibodies. In another certain embodiment, the antibodies are chimeric, human, or humanized antibodies. In yet another certain embodiment, the antibodies are single chain antibodies, and the antigen-binding fragments are F(ab′)2, Fab, Fd, or Fv fragments.

[0172] The solid microarray substrate may include, but not limited to, glass, silica, aluminosilicates, borosilicates, metal oxides such as alumina and nickel oxide, various clays, nitrocellulose, or nylon. The microarray substrates may be coated with a compound to enhance synthesis of a probe (peptide or nucleic acid) on the substrate. Coupling agents or groups on the substrate can be used to covalently link the first nucleotide or amino acid to the substrate. A variety of coupling agents or groups are known to those of skill in the art. Peptide or nucleic acid probes thus can be synthesized directly on the substrate in a predetermined grid. Alternatively, peptide or nucleic acid probes can be spotted on the substrate, and in such cases the substrate may be coated with a compound to enhance binding of the probe to the substrate. In these embodiments, presynthesized probes are applied to the substrate in a precise, predetermined volume and grid pattern, preferably utilizing a computer-controlled robot to apply probe to the substrate in a contact-printing manner or in a non-contact manner such as ink jet or piezo-electric delivery. Probes may be covalently linked to the substrate.

XII Prognosis, Staging, and Monitoring of Cancer

[0173] In one aspect, the present invention provides methods for determining cancer prognosis and stage based on examining the expression levels of the nucleic acid marker sequences and polypeptides using the methods described in the present invention. If cancer is detected in a subject using a technique other than by determining the expression levels of the marker sequences, then the differential expression level of the marker sequences can be used to determine the prognosis and stage for the subject. As used herein, prognosis refers to the prediction of the probable course and outcome of a disease.

[0174] In general, methods used for prognosis or stage of cancer involve comparison of the amount of the marker sequences in a sample of interest with that of a control to detect relative differences in the expression of the marker sequences, wherein the difference can be measured qualitatively and/or quantitatively. For example, the expression levels of one or more marker RNAs or polypeptides can be compared with the expression levels of the same marker RNAs or polypeptides in cancer free or normal samples. Alternatively, the expression levels of one or more marker RNAs or polypeptides can also be compared with the expression levels of the same marker RNAs or polypeptides observed in cancers that are known not to progress. In addition, the expression levels of one or more marker RNAs or polylpeptides can also be compared with the expression levels of the same marker RNAs or polypeptides observed in cancers that are known to progress and/or metastasize.

[0175] Also, as used herein, cancer stage refers to the sequence of the events, in which cancer develops and causes symptoms. In addition, staging is a process used to describe how advanced the cancerous state is in patient. Staging systems vary with the types of cancer, but generally involve the following “TNM” system: the type of tumor, indicated by T; whether the cancer has metastasized to nearby lymph nodes, indicated by N; and whether the cancer has metastasized to more distant parts of the body, indicated by M. Generally, if a cancer is only detectable in the area of the primary lesion without having spread to any lymph nodes it is called Stage I. If it has spread only to the closest lymph nodes, it is called Stage II. In Stage III, the cancer has generally spread to the lymph nodes in near proximity to the site of the primary lesion. Cancers that have spread to a distant part of the body, such as the liver, bone, brain or other site, are Stage IV, the most advanced stage. Methods of the present invention are useful in assaying the staging of cancer. The staging of cancer can be accomplished by determining the expression levels of one or more marker RNAs or polypeptides to a reference expression levels of the same marker RNAs or polypeptides. The reference expression levels of the marker RNAs or polypeptides can be that from cancer free or healthy or cancer samples, wherein the cancer can be at different stages in development.

[0176] The present invention further provides methods of monitoring cancer progression or recurrence by measuring the expression levels of the marker RNAs or polypeptides over the time. In one embodiment, the methods comprise:

[0177] (1). detecting in a biological sample of the subject at a first point in time, the expression of one or more nucleic acid sequences comprising one or more nucleic acid sequences selected from the group consisting of SEQ ID NOs: 1-93;

[0178] (2). repeating step (a) at a subsequent point in time; and

[0179] (3). comparing the expression level detected in steps (a) and (b), wherein a change in the expression level is indicative of progression of cancer or a pre-malignant condition thereof in the subject.

[0180] In another embodiment, the methods comprise:

[0181] (1). detecting in a biological sample of the subject at a first point in time, the expression of one or more polypeptides comprising one or more polypeptide sequences selected from the group consisting of SEQ ID NOs: 94-186;

[0182] (2). repeating step (a) at a subsequent point in time; and

[0183] (3). comparing the expression level detected in steps (a) and (b), wherein a change in the expression level is indicative of progression of cancer or a pre-malignant condition thereof in the subject.

[0184] For example, elevated expression levels of one or more over-expressed marker RNAs or polypeptides, or reduced expression levels of one or more under-expressed marker RNAs or polypeptides in a subsequent point in time relative to an earlier point in time, indicate that the cancer is progressing to a more severe stage. On the other hand, reduced expression levels of one or more over-expressed marker RNAs or polypeptides, or elevated expression levels of one or more under-expressed marker RNAs or polypeptides in a subsequent point in time relative to an earlier point in time, indicate that the cancer is not progressing or is progressing slowly.

[0185] The methods used in prognosis, staging, and monitoring cancer can be applied to various types of cancer. Examples of cancer include but not limited to, adenocarcinoma, lymphoma, blastoma, melanoma, sarcoma, and leukemia. More particularly, examples of cancer also include squamous cell cancer, small-cell lung cancer, non-small cell lung cancer, gastrointestinal cancer, Hodgkin's and non-Hodgkin's lymphoma, pancreatic cancer, glioblastoma, cervical cancer, ovarian cancer, liver cancer such as hepatic carcinoma and hepatoma, bladder cancer, breast cancer, colon cancer, colorectal cancer, endometrial carcinoma, salivary gland carcinoma, kidney cancer such as renal cell carcinoma and Wilms' tumors, basal cell carcinoma, melanoma, prostate cancer, vulval cancer, thyroid cancer, testicular cancer, esophageal cancer, and various types of head and neck cancer. Preferably, the cancers include breast, colon, and lung cancer. More preferably, the cancer is colon cancer, and the marker sequences are the ones comprising a nucleic acid sequence selected from the group consisting of SEQ ID NOs: 1-93.

XIII Efficacy of Therapy and Therapeutic Compositions

[0186] In one aspect, the present invention also provides methods that permit the assessment and/or monitoring of patients who will be likely to benefit from both traditional and non-traditional treatments and therapies for cancers, particularly colon cancer. The present invention thus embraces testing, screening and monitoring of patients undergoing anti-cancer treatments and therapies, used alone, in combination with each other, and/or in combination with anti-cancer drugs, anti-neoplastic agents, chemotherapeutics and/or radiation and/or surgery, to treat cancer patients.

[0187] An advantage of the present invention is the ability to monitor, or screen over time, those patients who can benefit from one, or several, of the available cancer therapies, and preferably, to monitor patients receiving a particular type of therapy, or a combination therapy, over time to determine how the patient is faring from the treatment(s), if a change, alteration, or cessation of treatment is warranted; if the patient's disease has been reduced, ameliorated, or lessened; or if the patient's disease state or stage has progressed, or become metastatic or invasive. The cancer treatments embraced herein also include surgeries to remove or reduce in size a tumor, or tumor burden, in a patient. Accordingly, the methods of the invention are useful to monitor patient progress and disease status post-surgery.

[0188] The identification of the correct patients for a cancer therapy according to this invention can provide an increase in the efficacy of the treatment and can avoid subjecting a patient to unwanted and life-threatening side effects of the therapy. By the same token, the ability to monitor a patient undergoing a course of therapy using the methods of the present invention can determine whether a patient is adequately responding to therapy over time, to determine if dosage or amount or mode of delivery should be altered or adjusted, and to ascertain if a patient is improving during therapy, or is regressing or is entering a more severe or advanced stage of disease, including invasion or metastasis, as discussed further herein.

[0189] A method of monitoring according to this invention reflects the serial, or sequential, testing or analysis of a cancer patient by testing or analyzing the patient's body fluid sample over a period of time, such as during the course of treatment or therapy, or during the course of the patient's disease. For instance, in serial testing, the same patient provides a body fluid sample, e.g., serum or plasma, or has sample taken, for the purpose of observing, checking, or examining the expression levels of one or more of the markers (RNA or polypeptide) of the invention in the patient by measuring the levels of one or more of these markers during the course of treatment, and/or during the course of the disease, according to the methods of the invention.

[0190] Similarly, a patient can be screened over time to assess the levels of one or more of the markers in a biological sample for the purposes of determining the status of his or her disease and/or the efficacy, reaction, and response to cancer or neoplastic disease treatments or therapies that he or she is undergoing. It will be appreciated that one or more pretreatment sample(s) is/are optimally taken from a patient prior to a course of treatment or therapy, or at the start of the treatment or therapy, to assist in the analysis and evaluation of patient progress and/or response at one or more later points in time during the period that the patient is receiving treatment and undergoing clinical and medical evaluation.

[0191] In monitoring a patient's levels of one or more of the markers of the invention over a period of time, which may be days, weeks, months, and in some cases, years, or various intervals thereof, the patient's body fluid sample, e.g., a serum or plasma sample, is collected at intervals, as determined by the practitioner, such as a physician or clinician, to determine the levels of one or more of the markers in the cancer patient compared to the respective levels of one or more of these analytes in normal individuals over the course or treatment or disease. For example, patient samples can be taken and monitored every month, every two months, or combinations of one, two, or three month intervals according to the invention. Quarterly, or more frequent monitoring of patient samples, is advisable.

[0192] The levels of the one or more markers found in the patient are compared with the respective levels of the one or more of these markers in normal individuals, and with the patient's own marker levels, for example, obtained from prior testing periods, to determine treatment or disease progress or outcome. Accordingly, use of the patient's own marker levels monitored over time can provide, for comparison purposes, the patient's own values as an internal personal control for long-term monitoring of marker levels, and thus cancer presence and/or progression. As described herein, following a course of treatment or disease, the determination of an increase or a decrease in one or more of the marker levels in the cancer patient over time compared to the respective levels of one or more of these markers in normal individuals reflects the ability to determine the severity or stage of a patient's cancer, or the progress, or lack thereof, in the course or outcome of a patient's cancer therapy or treatment.

[0193] Increases or decreases in the levels of the markers in cancer patients are determined by comparing the values obtained from analyzing cancer patient samples compared to the normal control range expression levels. A biomarker is said to be over-expressed if expression of the marker is at least 2 fold greater in the cancer patient relative to a normal control, and a biomarker is said to be under expressed if the expression of the marker is at least 2 fold greater in the normal control relative to in the cancer patient.

[0194] In monitoring a patient over time, a reduction in the levels of one or more of a patient's marker levels from increased levels (i.e., at least 2 fold over-expressed) compared to normal range values to levels at or near to the levels of the analytes found in normal individuals is indicative of treatment progress or efficacy, and/or disease improvement, remission, tumor reduction or elimination, and the like. Likewise, in all of the methods described in the embodiments of this invention, a determination of a reduction of one or more of a patient's marker levels from an elevated level (i.e., at least 2 fold over-expressed) to, or approximately to, the respective levels of one or more of these analytes found in normal individuals provides a further aspect of the methods of the invention, in which a patient's improvement, recovery or remission, and/or treatment progress or efficacy, is able to be ascertained over time following performance of the method.

[0195] Another embodiment of the present invention encompasses a method of monitoring a cancer patient's course of disease, or the efficacy of a cancer patient's treatment or therapy. The patient's treatment or therapy can involve traditional therapies, such as hormone therapy, chemotherapeutic drug therapy, radiation, or novel therapies, or a combination of any of the foregoing. The method involves measuring levels of one or more markers in a body fluid sample of the cancer patient and determining if the levels of one or more of the markers in the patient's sample are changed by at least 2 fold compared to the respective levels of one or more of these analytes in normal controls during the course of disease or cancer treatment. In accordance with the method, a change in the levels of the marker in the cancer patient compared to the respective levels of the marker in normal controls is indicative of a change in stage, grade, severity or progression of the patient's cancer and/or a lack of efficacy or benefit of the cancer treatment or therapy provided to the patient during a course of treatment, e.g., poor treatment or clinical outcome.

[0196] As will be understood by the skilled practitioner in the art, the monitoring method according to this invention is preferably, performed in a serial or sequential fashion, using samples taken from a patient during the course of disease, or a disease treatment regimen, (e.g., after a number of days, weeks, months, or occasionally, years, or various multiples of these intervals) to allow a determination of disease progression or outcome, and/or treatment efficacy or outcome. If the sample is amenable to freezing or cold storage, the samples may be taken from a patient (or normal individual) and stored for a period of time prior to analysis.

[0197] In another of its embodiments, the present invention encompasses the determination of the amounts or levels of one or more additional cancer markers in conjunction with the determination of the levels of one or more of the markers of the invention in a sample to be analyzed.

[0198] The present invention also includes a method of assessing the efficacy of a test composition for inhibiting cancers, such as colon cancer. As described above, differential expression levels of the marker sequences of the invention correlate with the cancerous state of cancer cells, particularly colon cancer cells. It is recognized that changes in the expression levels of the marker sequences of the present invention result from the cancerous state of cells. Thus, composition which inhibit cancer in a patient will cause the expression levels of the marker sequences to change to a level near the normal level of expression for the marker sequences. The method thus comprises comparing expression levels of one or more marker sequences in a first biological sample maintained in the presence of a test composition with those of the same marker sequences in a second biological sample maintained in the absence of the test composition. A significant difference in the expression levels of one or more marker sequences is an indication that the test composition inhibits the cancer. In a preferred embodiment, the cancer is colon cancer, and the marker sequences are the ones listed in Tables 1 and 2. In another embodiment, the cell samples may be aliquots of a single sample obtained from either a healthy subject or a patient with cancerous conditions.

XIV Modulators of the Marker Sequences

[0199] It is recognized that changes in the expression levels of the marker sequences likely induce, maintain, and promote the cancerous state of cells. Thus, another aspect of the present invention is directed to the modulators of the marker sequences capable of modulating the differentiation and proliferation of cells. In this regard, the present invention provides assays for determining compounds that modulate the expression of the marker sequences. The compounds can be used to modulate the biological activity of the polypeptides encoded by the marker sequences or the marker sequences themselves. Compounds can also be useful in a variety of different environments, including as medicinal agents to treat or prevent disorders associated with cancer.

[0200] Methods of identifying compounds generally comprise steps in which a compound is placed in contact with a marker sequence, its transcription product, its translation product, or other target, and determination of whether the compound modulates the marker sequence. For modulating the expression of a marker sequence, a method can comprise, in any effective order, one or more of the following steps, e.g., contacting the marker sequence (e.g., in a cell population) with a test compound under conditions effective for said test compound to modulate the expression of the marker sequence, and determining whether said test agent modulates said sequence. A compound can modulate expression of a sequence at any level, including transcription (e.g., by modulating the promoter), translation, and/or perdurance of the nucleic acid (e.g., degradation, stability, etc.) in the cell.

[0201] For modulating the biological activity of polypeptides, a method can comprise, in any effective order, one or more of the following steps, e.g. , contacting a polypeptide (e.g., in a cell, lysate, or isolated) with a test compound under conditions effective for said test agent to modulate the biological activity of said polypeptide, and determining whether said test compound modulates said biological activity.

[0202] Contacting the polynucleotide or polypeptide with the test compound can be accomplished by any suitable method and/or means that places the compound in a position to functionally control expression or biological activity of the gene or its product in the sample. Functional control indicates that the compound can exert its physiological effect through whatever mechanism it works. The choice of the method and/or means can depend upon the nature of the compound and the condition and type of environment in which the gene or its product is presented, e.g., lysate, isolated, or in a cell population (such as, in vivo, in vitro, organ explants, etc.). For example, if the cell population is an in vitro cell culture, the compound can be contacted with the cells by adding it directly into the culture medium. If the compound cannot dissolve readily in an aqueous medium, it can be incorporated into liposomes, or another lipophilic carrier, and then administered to the cell culture. Contact can also be facilitated by incorporation of compound with carriers and delivery molecules and complexes, by injection, by infusion, etc.

[0203] After the agent has been administered in such a way that it can gain access to the gene or gene product (including DNA, mRNA, and polypeptides), it can be determined whether the test compound modulates its expression or biological activity. Modulation can be of any type, quality, or quantity, e.g., increase, facilitate, enhance, up-regulate, stimulate, activate, amplify, augment, induce, decrease, down-regulate, diminish, lessen, reduce, etc. The modulatory quantity can also encompass any value, e.g., 1%, 5%, 10%, 50%, 75%, 1-fold, 2-fold, 5-fold, 10-fold, 100-fold, etc. To modulate gene expression means, e.g., that the test compound has-an effect on its expression, e.g., to effect the amount of transcription, to effect RNA splicing, to effect translation of the RNA into polypeptide, to effect RNA or polypeptide stability, to effect polyadenylation or other processing of the RNA, to effect post-transcriptional or post-translational processing, etc. To modulate biological activity means, e.g., that a functional activity of the polypeptide is changed in comparison to its normal activity in the absence of the compound. This effect includes, increase, decrease, block, inhibit, enhance, etc.

[0204] A test compound can be of any molecular composition, e.g., chemical compounds, biomolecules, such as polypeptides, lipids, nucleic acids (e.g., antisense to a polynucleotide) carbohydrates, antibodies, ribozymes, double-stranded RNA, aptamers, etc. For example, if a polypeptide to be modulated is a cell-surface molecule, a test compound can be an antibody that specifically recognizes it and, e.g., causes the polypeptide to be internalized, leading to its down regulation on the surface of the cell. Such effect does not have to be permanent, but can require the presence of the antibody to continue the down-regulatory effect. Antibodies can also be used to modulate the biological activity of a polypeptide in a lysate or other cell-free form.

XV Drug Screening

[0205] In one aspect, the present invention is also directed to methods for screening drugs that inhibit cancer, particularly colon cancer. Drug screening is performed by adding a test compound to a sample of cells, and monitoring the effect. A parallel sample which does not receive the test compound is also monitored as a control. The treated and untreated cells are then compared by any suitable phenotypic criteria, including but not limited to microscopic analysis, viability testing, ability to replicate, histological examination, the level of a particular RNA or polypeptide associated with the cells, the level of enzymatic activity expressed by the cells or cell lysates, and the ability of the cells to interact with other cells or compounds. Differences between treated and untreated cells indicates effects attributable to the test compound.

[0206] Desirable effects of a test compound include an effect on any phenotype that was conferred by the cancer-associated marker nucleic acid sequence. Examples include a test compound that limits the overabundance of mRNA, limits production of the encoded protein, or limits the functional effect of the protein. The effect of the test compound would be apparent when comparing results between treated and untreated cells. For example, candidate compounds may be identified that down-regulate expression of one specific gene. In one embodiment, candidate compounds may be identified that up-regulate expression of one specific gene. Generally a plurality of assay mixtures are run in parallel with different compound concentrations to obtain a differential response to the various concentrations. Typically, one of these concentrations serves as a negative control, i.e., at zero concentration or below the level of detection.

[0207] Screening assays can be based upon any of a variety of techniques readily available and known to one of ordinary skill in the art. In general, the screening assays involve contacting a cancerous cell (preferably a cancerous colon cell) with a candidate agent, and assessing the effect upon biological activity of a differentially expressed gene product. The effect upon a biological activity can be detected by, for example, detection of expression of a gene product of a differentially expressed gene (e.g., a decrease in mRNA or polypeptide levels, would in turn cause a decrease in biological activity of the gene product). Alternatively or in addition, the effect of the candidate agent can be assessed by examining the effect of the candidate agent in a functional assay. For example, where the differentially expressed gene product is an enzyme, then the effect upon biological activity can be assessed by detecting a level of enzymatic activity associated with the differentially expressed gene product. The functional assay will be selected according to the differentially expressed gene product.

[0208] The screening methods may include both in vitro and in vivo screening of a cell or tissue. One particular embodiment of in vitro method comprises a method of determining the efficacy of a test compound for inhibiting cancer in a subject, the method comprising comparing a) the expression level of one or more nucleic acid sequences in a first biological sample from the subject wherein the sample has been exposed to the test compound, with b) the expression level of said nucleic acid sequences in a second biological sample from the subject wherein the sample has not been exposed to the test compound, said nucleic acid sequences comprising one or more nucleic acid sequences selected from the group consisting of SEQ ID NOs: 1-93, wherein a change of at least two fold in the expression level of said nucleic acid sequences is an indication that the test compound is efficacious for inhibiting cancer in the subject.

[0209] In another embodiment, the in vivo methods of screening for compounds that alter the expression of the marker sequences comprise exposing a subject, preferably a mammal having cancer cells in which the marker sequences (either at mRNA or polypeptide level) are detectable, to a compound, and determining the level of the marker sequences. Where the differentially expressed gene is increased in expression in a cancerous cell, the compound of interest is those that decrease activity of the differentially expressed gene product, and where the differentially expressed gene is decreased in expression in a cancerous cell, the compound of interest is those that increase activity of the differentially expressed gene product.

[0210] Assays for determining the differentially expressed marker sequences (described supra) can be readily adapted in the screening assay embodiments of the present invention. Exemplary assays useful in screening candidate compounds include, but are not limited to, hybridization-based assays (e.g. use of nucleic acid probes or primers to assess expression levels), antibody-based assays (e.g. to assess levels of polypeptide gene products), binding assays (e.g. to detect interaction of a candidate agent with a differentially expressed polypeptide, which assays may be competitive assays where a natural or synthetic ligand for the polypeptide is available), and the like. Additional exemplary assays include, but are not necessarily limited to, cell proliferation assays, antisense knockout assays, assays to detect inhibition of cell cycle, assays of induction of cell death/apoptosis, and the like.

[0211] In one embodiment, the candidate compound is naturally occurring or modified proteins. In another embodiment, candidate compounds are peptides. The peptides may be digests of naturally occurring proteins, or the one made by chemical synthesis. Furthermore, the synthetic process can be designed to generate randomized proteins, to allow the formation of all or most of the possible combinations over the length of the sequence, thus forming a library of randomized candidate proteinaceous drugs.

[0212] In another embodiment, the candidate compounds are nucleic acids, either naturally occurring or modified. In a preferred embodiment, the nucleic acid compounds are antisense nucleic acids. Drug candidates that are antisense molecules include antisense or sense oligonucleotides comprising a single-strand nucleic acid sequence (either RNA or DNA) capable of binding to target mRNA or DNA sequences for lung cancer molecules identified by the methods of the invention.

[0213] In yet another preferred embodiment, drug candidates are antibodies. An antibody used in methods for screening for a candidate drug may either bind a full length protein or a fragment thereof. In a preferred embodiment, the antibody binds a unique epitope on a target protein and shows little or no cross-reactivity. The term “antibody” is understood to include antibody fragments, as are known in the art, including Fab, Fab₂, single chain antibodies (Fv for example), chimeric antibodies, etc., either produced by the modification of whole antibodies or those synthesized de novo using recombinant DNA technologies known in the art. Antibodies as used herein as drug candidates include both polyclonal and monoclonal antibodies. Polyclonal antibodies can be raised in a mammal, for example, by one or more injections of an antigenic agent and, if desired, an adjuvant. It may be useful to conjugate the antigenic agent to a protein known to be immunogenic in the mammal being immunized.

[0214] In yet another embodiment, the candidate compounds are chemical compounds. In a preferred embodiment, the candidate compounds are small organic compounds having a molecular weight of more than 100 and less than about 2500 daltons. Candidate compounds may also include functional groups necessary for structural interaction with proteins or nucleic acids.

XVI Kits

[0215] The present invention also provides for kits that contain the necessary reagents for detection of the expression levels (either at RNA or polypeptide level) of the individual and/or combinations of marker sequences in a biological sample. Reagents can include marker sequence-specific probes/primers and antibodies as described supra. Kits can also contain a control/reference value or a set of control/reference values indicating normal and various clinical progression stages of cancer. In a preferred embodiment, the control/reference value or a set of control/reference values are indicative of normal and various clinical progression stages of colon cancer. Moreover, kits can contain positive controls, and/or negative controls for comparison with the test sample. A negative control can contain a sample that does not have any marker RNA or polypeptide. A positive control can contain a sample that have various known levels of marker RNA or polypeptide. Kits can also contain any combinations of the marker sequence-specific probes/primers and/or antibodies. Kits can also contain instructions for conducting the assays and for interpreting the results. For antibody-based kit, the kit can comprise, for example: (1) a first antibody (e.g., attached to a solid support) which binds to a polypeptide corresponding to a marker of the invention; and, optionally, (2) a second, different antibody which binds to either the polypeptide or the first antibody and is conjugated to a detectable label. For oligonucleotide-based kits, the kit can comprise, for example: (1) an oligonucleotide, e.g., a detectably labeled oligonucleotide, which hybridizes to a nucleic acid sequence encoding a polypeptide corresponding to a marker sequence of the invention or (2) a pair of primers useful for amplifying a nucleic acid molecule corresponding to a marker of the invention. The kit can also comprise, e.g., a buffering agent, a preservative, or a protein stabilizing agent. The kit can further comprise components necessary for detecting the detectable label (e.g., an enzyme or a substrate). The kit can also contain a control sample or a series of control samples which can be assayed and compared to the test sample. Each component of the kit can be enclosed within an individual container and all of the various containers can be within a single package, along with instructions for interpreting the results of the assays performed using the kit.

[0216] Such kits can be used to determine whether a subject is suffering from or at an increased risk of developing cancer, particularly colon cancer. Furthermore, such kits can be used to determine the prognosis, stage, or monitoring the progression of cancer, particularly colon cancer. Furthermore, such kits can be used for drug screening or for selection of treatment for cancer, particularly colon cancer.

### EXAMPLES

[0217] The examples below are non-limiting and are merely representative of various aspects and features of the present invention.

### Example 1

### Identification of Differentially Expressed Marker Sequences

[0218] Twenty well characterized, microdissected samples of colorectal cancer tissue were obtained from consenting patients. A second set of twenty, microdissected samples of normal adjacent colon tissue were also obtained. Total RNA was extracted from these samples using RNeasy kits (QIAGEN, Valencia, Calif.) according to the manufacturer's instructions. Expression profiling was performed using the GeneChip expression arrays from Affymetrix (Santa Clara, Calif.). Reverse transcription, second-strand synthesis, and probe generation was accomplished by standard Affymetrix protocols. The Human Genome U133A GeneChip, which contains more than 15,000 substantiated human genes, was hybridized, washed, and scanned according to Affymetrix protocols. Changes in cellular mRNA levels in the cancerous tissues were compared with mRNA levels in the normal colon tissues. GeneSpring v4.2 (Silicon Genetics, Redwood City, Calif.) was used to normalize and scale results and compare gene expression levels in the cancer tissue relative to that in the normal tissue.

[0219] Applying a set of filters to the normalized data identified the up- and down-regulated genes. First, a non-parametric test defined the genes that were statistically associated with either the cancer or the normal samples. Next, a pair of filters was used to remove the genes with low signals and to set a high threshold for a minimum expression levels. The final filter required a three-fold average expression difference between the two conditions (cancer and normal).

[0220] This analysis resulted in 47 genes that were up-regulated in the colorectal cancer tissue relative to the normal adjacent colon tissue. These genes are identified in Table 1. Likewise, 46 down-regulated genes were identified in the colorectal cancer tissue relative to the normal adjacent colon tissue. These genes are listed in Table 2.

### OTHER EMBODIMENTS

[0221] Other embodiments will be evident to those of skill in the art. It should be understood that the foregoing detailed description is provided for clarity only and is merely exemplary. The spirit and scope of the present invention are not limited to the above examples, but are encompassed by the following claims.

1. A method of detecting differential expression of one or more nucleic acid sequences in a biological sample, comprising:
(a) obtaining the sample from a subject; and
(b) detecting a change in the expression level of one or more nucleic acid sequences relative to a control expression level of the nucleic acid sequences, said nucleic acid sequences comprising one or more nucleic acid sequences selected from the group consisting of SEQ ID NOs: 1-93.

2. The method of claim 1, wherein said step of detecting comprises:
(a) contacting said sample with a polynucleotide probe comprising at least 12 consecutive nucleotides of a nucleic acid sequence, said probe is capable of hybridizing under stringent conditions to a nucleic acid sequence selected from the group consisting of SEQ ID NOs: 1-93;
(b) detecting the hybridization of said polynucleotide probe to said nucleic acid sequence selected from the group consisting of SEQ ID NOs: 1-93, wherein the signal intensity of hybridization is indicative of the expression level of a nucleic acid sequence selected from the group consisting of SEQ ID NOs: 1-93.

3. The method of claim 2, wherein said probe comprises a detectable label.

4. The method of claim 1, wherein said change in the expression level is either an increase or an decrease in expression level.

5. The method of claim 1, wherein said change in the expression level is at least two fold.

6. A method of detecting cancer or a pre-malignant condition thereof in a subject comprising comparing a) the expression level of one or more nucleic acid sequences in a biological sample from the subject with b) a control expression level of said nucleic acid sequences, said nucleic acid sequences comprising one or more nucleic acid sequences selected from the group consisting of SEQ ID NOs: 1-93, wherein a change of at least two-fold in the expression level of said nucleic acid sequences is indicative of cancer or pre-malignant condition.

7. The method of claim 6, wherein said change in the expression level is either an increase or decrease in the expression level.

8. A method of monitoring the onset, progression, or regression of cancer or a pre-malignant condition thereof in a subject, the method comprising:
(a) detecting in a biological sample of the subject at a first point in time, the expression of one or more nucleic acid sequences comprising one or more nucleic acid sequences selected from the group consisting of SEQ ID NOs: 1-93;
(b) repeating step (a) at a subsequent point in time; and
(c) comparing the expression level detected in steps (a) and (b), wherein a change in the expression level is indicative of progression of cancer or a pre-malignant condition thereof in the subject.

9. The method of claim 8, wherein the change in the expression level is either an increase or decrease.

10. A method of determining prognosis for cancer or a pre-malignant condition thereof in a subject, comprising:
(a) detecting in a biological sample of the subject, the expression level of one or more nucleic acid sequences comprising one or more nucleic acid sequences selected from the group consisting of SEQ ID NOs: 1-93;
(b) comparing the expression level detected in steps (a) with a reference expression level of said nucleic acid sequences; and
(c) evaluating the prognosis of the subject based on the comparison in step (b).

11. The method of claim 10, wherein the reference expression level is the expression level of said nucleic acid sequences in cancer free or normal sample.

12. The method of claim 10, wherein the reference expression level is the expression level of said nucleic acid sequences cancer samples that are known not to progress to aggressive form.

13. A method of determining the efficacy of a test compound for inhibiting cancer in a subject, the method comprising comparing a) the expression level of one or more nucleic acid sequences in a first biological sample from the subject wherein the sample has been exposed to the test compound, with b) the expression level of said nucleic acid sequences in a second biological sample from the subject wherein the sample has not been exposed to the test compound, said nucleic acid sequences comprising one or more nucleic acid sequences selected from the group consisting of SEQ ID NOs: 1-93, wherein a change of at least two fold in the expression level of said nucleic acid sequences is an indication that the test compound is efficacious for inhibiting cancer in the subject.

14. The method of claim 13, wherein the change in the expression level is either an increase or decrease.

15. A method of determining the efficacy of a therapy for inhibiting cancer in a subject, the method comprising comparing a) the expression level of one or more nucleic acid sequences in a first biological sample from the subject prior to providing at least a portion of the therapy to the subject, with b) the expression level of said nucleic acid sequences in a second biological sample from the subject following the provision of the portion of the therapy, said nucleic acid sequences comprising one or more nucleic acid sequences selected from the group consisting of SEQ ID NOs: 1-93, wherein a change of at least two fold in the expression level of said nucleic acid sequences is an indication that the therapy is efficacious for inhibiting cancer in the subject.

16. The method of claim 15, wherein the change in the expression level is either an increase or decrease.

17. A method of selecting a composition for inhibiting cancer in a subject, the method comprising:
(a) obtaining a first biological sample comprising cancer cells from the subject;
(b) separately exposing aliquots of the sample in the presence of a plurality of test compositions;
(c) comparing the expression level of one or more nucleic acid sequences in each of the aliquots from (b) with the expression level in the sample produced by (a), said nucleic acid sequences comprising one or more nucleic acid sequences selected from the group consisting of SEQ ID NOs: 1-93; and
(d) selecting one of the test compositions which induces a change of at least two fold in the expression level of said nucleic acid sequences in one aliquot containing the test composition.

18. The method of claim 17, wherein the change in the expression level is either an increase or decrease.

19. A method of inhibiting cancer in a subject, the method comprising:
(a) obtaining a first biological sample comprising cells from the subject;
(b) administering to the subject one or more test compositions;
(c) obtaining a second biological sample comprising cells from the subject of (b); and
(d) comparing the expression level of one or more nucleic acid sequences in the first sample with the expression level of said nucleic acid sequences in the second sample, wherein a change of at least two fold in the expression level is indicative of inhibition of cancer by said test compositions.

20. A polypeptide comprising a polypeptide sequence selected from the group consisting of SEQ ID NOs: 94-186.

21. An antibody that specifically binds to a polypeptide sequence selected from the group consisting of SEQ ID NOs: 94-186.

22. The antibody of claim 21, wherein said antibody is polyclonal antibody.

23. The antibody of claim 21, wherein said antibody is monoclonal antibody.

24. A method of detecting in a biological sample the presence of a polypeptide comprising a polypeptide sequence selected from the group consisting of SEQ ID NOs: 94-186, said method comprising:
(a) obtaining said biological sample from a subject;
(b) contacting said sample with a polypeptide ligand which is capable of binding to one or more of SEQ ID NOs: 94-186; and
(c) detecting the binding of said polypeptide ligand to said polypeptide, wherein detecting of binding is indicative of the presence of said polypeptide sequence comprising a polypeptide sequence selected from the group consisting of SEQ ID NOs: 94-186 in said biological sample.

25. The method of claim 24, wherein the polypeptide ligand is an antibody.

26. The method of claim 24, wherein the polypeptide ligand comprises a detectable label.

27. The method of claim 25, wherein the antibody is a monoclonal antibody.

28. A method of detecting cancer or a pre-malignant condition thereof in a subject comprising:
(a) obtaining a biological sample from a subject;
(b) contacting the sample with one or more polypeptide ligands that bind specifically to one or more polypeptides comprising a polypeptide sequence selected from the group consisting of SEQ ID NOs: 94-186;
(c) determining specific binding; and
(d) comparing the specific binding between the polypeptide ligands and the polypeptides in the sample with the specific binding between the polypeptide ligands and the polypeptides in a cancer-free sample, wherein a significant change in the specific binding is diagnostic for cancer in the subject.

29. A method of monitoring the onset, progression, or regression of cancer in a subject, comprising:
(a) contacting at a first point in time a first biological sample with one or more polypeptide ligands that specifically bind to one or more polypeptides comprising a polypeptide sequence selected from the group consisting of SEQ ID NOs: 94-186, determining specific binding between the polypeptide ligands and the polypeptides;
(b) contacting at a subsequent point in time a second biological sample with said polypeptide ligands that specifically bind to one or more polypeptides comprising a polypeptide sequence selected from the group consisting of SEQ ID NOs: 94-186, determining specific binding between the polypeptide ligands and the polypeptides; and
(c) comparing the specific binding in the first biological sample to the specific binding in the second biological sample, wherein a significant change in the specific binding is an indication of the onset, progression, or regression of cancer.

30. A method of determining prognosis for cancer or a pre-malignant condition thereof in a subject, comprising:
(a) contacting a biological sample obtained from a subject having cancer with one or more polypeptide ligands that bind specifically to one or more polypeptides comprising a polypeptide sequence selected from the group consisting of SEQ ID NOs: 94-186;
(b) determining specific binding;
(c) comparing the specific binding between the polypeptide ligands and the polypeptides in the sample with the specific binding between the polypeptide ligands and the polypeptides either in a cancer-free sample or in a cancer sample that is known not to progress to aggressive form; and
(d) evaluating the prognosis of the subject based on the comparison in step (c).

31. A method of determining the efficacy of a test compound for inhibiting cancer in a subject, the method comprising comparing a) in a first biological sample from the subject binding between one or more polypeptide ligands that specifically bind to one or more polypeptides comprising a polypeptide sequence selected from the group consisting of SEQ ID NOs: 94-186 and one or more polypeptides comprising a polypeptide sequence selected from the group consisting of SEQ ID NOs: 94-186, wherein the sample has not been exposed to the test compound, with b) in a second biological sample from the subject, the specific binding of said polypeptide ligands and said polypeptides, wherein the sample has been exposed to the test compound, and wherein a significant change in the specific binding is an indication that the test compound is efficacious for inhibiting cancer in the subject.

32. A method of determining the efficacy of a therapy for inhibiting cancer in a subject, comprising comparing a) in a first biological sample from the subject prior to a treatment, binding between one or more polypeptide ligands that specifically bind to one or more polypeptides comprising a polypeptide sequence selected from the group consisting of SEQ ID NOs: 94-186 and one or more polypeptides comprising a polypeptide sequence selected from the group consisting of SEQ ID NOs: 94-186, with b) in a second biological sample from the subject following the treatment, the specific binding of said polypeptide ligands and said polypeptides, and wherein a significant change in the specific binding is an indication that the test compound is efficacious for inhibiting cancer in the subject.

33. A method of selecting a composition for inhibiting cancer in a subject, comprising
(a) obtaining a first biological sample comprising cancer cells from the subject;
(b) separately exposing aliquots of the sample in the presence of a plurality of test compositions;
(c) comparing the specific binding between one or more polypeptide ligands and one or more polypeptides in each of the aliquots from (b) with the specific binding between said polypeptide ligands and said polypeptides in each of the aliquots from (a), wherein said ligands comprising a polypeptide sequence selected from the group consisting of SEQ ID NOs: 94-186, and wherein said polypeptides comprising a polypeptide sequence selected from the group consisting of SEQ ID NOs: 94-186; and
(d) selecting one of the test compositions which induces a significant change in specific binding.

34. A method of inhibiting cancer in a subject with cancer, comprising:
(a) obtaining a first biological sample comprising cells from the subject;
(b) administering to the subject one or more test compositions;
(c) obtaining a second biological sample comprising cells from the subject of (b); and
(d) comparing the specific binding between one or more polypeptide ligands and one or more polypeptides in the first sample with the specific binding between said polypeptide ligands and said polypeptides in the second sample, wherein said ligands comprising a polypeptide sequence selected from the group consisting of SEQ ID NOs: 94-186, and wherein said polypeptides comprising a polypeptide sequence selected from the group consisting of SEQ ID NOs: 94-186, and wherein a significant change in the specific binding is an indication of inhibition cancer by said test compositions.

The application's sequence listing, which the Patent Office published only in electronic form, follows.

SEQUENCE LISTING (186 sequences)

SEQ ID NO: 1 - DNA, 2163 bp, Homo sapiens
ggcagatgaaatataagattcatcaaccacatttgacagcccatggcaggtttcctgttttccatcgtccctctgcaggtcacagacacacagagcccagccgtggcaggctcagccggggtccggggctgctaacaacggctacattcctcccccagggccaagggaaatcctgagcgcaggccagggttgtttggttttgaggtgtgctgggatgaaaggcaccctggaagtggaaggtaaatgaacaatggaaaaacttcacggcaagattagaaagatacctgagcccaatacccgcctgatgtcgtgggccacacctccgggttaccaggggaagggaggaagcaaactgtcatattgatgtggctctaaacaacaacagtgtgcgaaggcccaggggcactttgggattgaccaagaggaaacacaagttgcacaatgatacaatcttgttggtacaattgtcagagaagggaactcccacagcaaaggccataaaaccatccagggcagtctggggcggctcagttctgcggtgccagggagtggagcagagctcagccccgtcccaaacacagatgggaccatgaactccggacacagcttcagccagaccccctcggcctccttccatggcgccggaggtggctggggccggcccaggagcttccccagggctcccaccgtccatggcggtgcggggggagcccgcatctccctgtccttcaccacgcggagctgcccaccccctggagggtcttggggttctggaagaagcagccccctactaggcggaaatgggaaggccaccatgcagaatctcaacgaccgcctggcctcctacctggagaaggttcgcgccctggaggaggccaacatgaagctggaaagccgcatcctgaaatggcaccagcagagagatcctggcagtaagaaagattattcccagtatgaggaaaacatcacacacctgcaggagcagatagtggatggtaagatgaccaatgctcagattattcttctcattgacaatgccaggatggcagtggatgacttcaacctcaagtatgaaaatgaacactcctttaagaaagacttggaaattgaagtcgagggcctccgaaggaccttagacaacctgaccattgtcacaacagacctagaacaggaggtggaaggaatgaggaaagagctcattctcatgaagaagcaccatgagcaggaaatggagaagcatcatgtgccaagtgacttcaatgtcaatgtgaaggtggatacaggtcccagggaagatctgattaaggtcctggaggatatgagacaagaatatgagcttataataaagaagaagcatcgagacttggacacttggtataaagaacagtctgcagccatgtcccaggaggcagccagtccagccactgtgcagagcagacaaggtgacatccacgaactgaagcgcacattccaggccctggagattgacctgcagacacagtacagcacgaaatctgctttggaaaacatgttatccgagacccagtctcggtactcctgcaagctccaggacatgcaagagatcatctcccactatgaggaggaactgacgcagctacgccatgaactggagcggcagaacaatgaataccaagtgctgctgggcatcaaaacccacctggagaaggaaatcaccacgtaccgacggctcctggagggagagagtgaagggacacgggaagaatcaaagtcgagcatgaaagtgtctgcaactccaaagatcaaggccataacccaggagaccatcaacggaagattagttctttgtcaagtgaatgaaatccaaaagcacgcatgagaccaatgaaagtttccgcctgttgtaaaatctattttcccccaaggaaagtccttgcacagacaccagtgagtgagttctaaaagatacccttggaattatcagactcagaaacttttattttttttttctgtaacagtctcaccagacttctcataatgctcttaatatattgcacttttctaatcaaagtgcgagtttatgagggtaaagctctactttcctactgcagccttcagattctcatcattttgcatctattttgtagccaataaaactccgcactagcaaaaaaaaaaaaaaaa

SEQ ID NO: 2 - DNA, 808 bp, Homo sapiens
gatataaagctcctacagctacctggcctgagaagccaactcagactcagccaacagagattgttgatttgcctcttaagcaagagattcattgcagctcagcatggctcagaccagctcatacttcatgctgatctcctgcctgatgtttctgtctcagagccaaggccaagaggcccagacagagttgccccaggcccggatcagctgcccagaaggcaccaatgcctatcgctcctactgctactactttaatgaagaccgtgagacctgggttgatgcagatctctattgccagaacatgaattcgggcaacctggtgtctgtgctcacccaggccgagggtgcctttgtggcctcactgattaaggagagtggcactgatgacttcaatgtctggattggcctccatgaccccaaaaagaaccgccgctggcactggagcagtgggtccctggtctcctacaagtcctggggcattggagccccaagcagtgttaatcctggctactgtgtgagcctgacctcaagcacaggattccagaaatggaaggatgtgccttgtgaagacaagttctcctttgtctgcaagttcaaaaactagaggcaactggaaaatacatgtctagaactgatccagcaattacaacggagtcaaaaattaaaccggaccatctctccaactcaactcaacctggacactctcttctctgctgagtttgccttgttaatcttcaatagttttacctaccccagtctttggaaccctaaataataaaaataaacatgtttccactattgtgctgtc

SEQ ID NO: 3 - DNA, 773 bp, Homo sapiens
aagccacctcaagtggacaaggcacttaccaacagagattgctgatttgctccttaagcaagagattcactgccgctaagcatggctcagaccaactcgttcttcatgctgatctcctccctgatgttcctgtctctgagccaaggccaggagtcccagacagagctgcctaatccccgaatcagctgcccagaaggcaccaatgcctatcgctcctactgctactactttaatgaagaccctgagacctgggttgatgcagatctctattgccagaacatgaattcaggcaacctggtgtctgtgctcacccaggcggagggtgccttcgtggcctcactgattaaggagagtagcactgatgacagcaatgtctggattggcctccatgacccaaaaaagaaccgccgctggcactggagtagtgggtccctggtctcctacaagtcctgggacactggatccccgagcagtgctaatgctggctactgtgcaagcctgacttcatgctcaggattcaagaaatggaaggatgaatcttgtgagaagaagttctcctttgtttgcaagttcaaaaactagaggaagctgaaaaatggatgtctagaactggtcctgcaattactatgaagtcaaaaattaaactagactatgtctccaactcagttcagaccatctcctccctaatgagtttgcatcgctgatcttcagtaccttcacctgtctcagtctctagagccctgaaaaataaaaacaaacttatttttatccag

SEQ ID NO: 4 - DNA, 1738 bp, Homo sapiens
cgggggggtactgtgcgagccctcaaggaggtggctgttctgtagctggagagctccgtgggtggcaggactgaacttgaacaccagaaacaacccccaagccttgtgacctgggaggcaggaggcgggtctgtctccctgggacttgggtggctgagccgaggtactcgggaccctgtcccgcgcatggcagagtggctcctcacagcctgaagctcatccttctgcacgggccagccaggccagcacagaggcaccagggcagcagtgcacacaggtccccggggaccccaccatgtggagcggatggtggctgtggccccttgtggccgtctgcactgcagacttctttcgggacgaggcagagaggatcatgagggactcccctgtcattgatgggcacaatgacctcccctggcagctgctggatatgttcaacaaccggctgcaggacgagagggccaacctgaccaccttggccggcacacacaccaacatccccaagctgagggccggctttgtgggaggccagttctggtccgtgtacacgccctgcgacacccagaacaaagacgccgtgcggaggacgctggagcagatggacgtggtccaccgcatgtgccggatgtacccggagaccttcctgtatgtcaccagcagtgcaggcattcggcaggccttccgggaagggaaggtggccagcctgatcggcgtggagggcggccactccattgacagcagtttgggcgtcctgcgggcactctatcagctgggcatgcggtacctgaccctcacccacagctgcaacacgccctgggctgacaactggctggtggacacgggagacagcgagccccagagccaaggcttgtcaccctttgggcagcgtgtggtgaaggagctgaaccgtctgggggtcctcatcgacttggctcacgtgtctgtggccaccatgaaggccaccctgcagctgtccagagccccggtcatcttcagccactcctcggcctacagcgtgtgcgcaagccggcgcaacgtgcctgacgacgtcctgaggctggtgaaacagacagacagcctggtgatggtgaacttctacaacaattacatttcctgcaccaacaaggccaacctgtcccaagtggccgaccatctggatcacatcaaggaggtggcaggagccagagccgtgggttttggtggggactttgatggtgttccaagggtccctgaggggctggaggacgtctccaagtatccagacctgatcgctgagctgctcaggaggaactggacggaggcggaggtcaagggcgcactggctgacaacctgctgagggtcttcgaggctgtggaacaggccagcaacctcacacaggctcccgaggaggagcccatcccgctggaccagctgggtggctcctgcaggacccattacggctactcctctggggcttccagcctccatcgccactgggggctcctgctggcctccctcgctcccctggtcctctgtctgtctctcctgtgaaacctgggagaccagagtcccctttagggttcccggagctccgggaagacccgcccatcccaggactccagatgccaggagccctgctgcccacatgcaaggaccagcatctcctgagaggacgcctgggcttacctggggggcaggatgcctggggacagttcaggacacacacacagtaggcccgcaataaaagcaacacccctt

SEQ ID NO: 5 - DNA, 1666 bp, Homo sapiens
ctccataaggcacaaactttcagagacagcagagcacacaagcttctaggacaagagccaggaagaaaccaccggaaggaaccatctcactgtgtgtaaacatgacttccaagctggccgtggctctcttggcagccttcctgatttctgcagctctgtgtgaaggtgcagttttgccaaggagtgctaaagaacttagatgtcagtgcataaagacatactccaaacctttccaccccaaatttatcaaagaactgagagtgattgagagtggaccacactgcgccaacacagaaattattgtaaagctttctgatggaagagagctctgtctggaccccaaggaaaactgggtgcagagggttgtggagaagtttttgaagagggctgagaattcataaaaaaattcattctctgtggtatccaagaatcagtgaagatgccagtgaaacttcaagcaaatctacttcaacacttcatgtattgtgtgggtctgttgtagggttgccagatgcaatacaagattcctggttaaatttgaatttcagtaaacaatgaatagtttttcattgtaccatgaaatatccagaacatacttatatgtaaagtattatttatttgaatctacaaaaaacaacaaataatttttaaatataaggattttcctagatattgcacgggagaatatacaaatagcaaaattgaggccaagggccaagagaatatccgaactttaatttcaggaattgaatgggtttgctagaatgtgatatttgaagcatcacataaaaatgatgggacaataaattttgccataaagtcaaatttagctggaaatcctggatttttttctgttaaatctggcaaccctagtctgctagccaggatccacaagtccttgttccactgtgccttggtttctcctttatttctaagtggaaaaagtattagccaccatcttacctcacagtgatgttgtgaggacatgtggaagcactttaagttttttcatcataacataaattattttcaagtgtaacttattaacctatttattatttatgtatttatttaagcatcaaatatttgtgcaagaatttggaaaaatagaagatgaatcattgattgaatagttataaagatgttatagtaaatttattttattttagatattaaatgatgttttattagataaatttcaatcagggtttttagattaaacaaacaaacaattgggtacccagttaaattttcatttcagataaacaacaaataattttttagtataagtacattattgtttatctgaaattttaattgaactaacaatcctagtttgatactcccagtcttgtcattgccagctgtgttggtagtgctgtgttgaattacggaataatgagttagaactattaaaacagccaaaactccacagtcaatattagtaatttcttgctggttgaaacttgtttattatgtacaaatagattcttataatattatttaaatgactgcatttttaaatacaaggctttatatttttaactttaagatgtttttatgtgctctccaaattttttttactgtttctgattgtatggaaatataaaagtaaatatgaaacatttaaaatataatttgttgtcaaagtaaaaaaaaaaaaaaa

SEQ ID NO: 6 - DNA, 1973 bp, Homo sapiens
gggatattggagtagcaagaggctgggaagccatcacttaccttgcactgagaaagaagacaaaggccagtatgcacagctttcctccactgctgctgctgctgttctggggtgtggtgtctcacagcttcccagcgactctagaaacacaagagcaagatgtggacttagtccagaaatacctggaaaaatactacaacctgaagaatgatgggaggcaagttgaaaagcggagaaatagtggcccagtggttgaaaaattgaagcaaatgcaggaattctttgggctgaaagtgactgggaaaccagatgctgaaaccctgaaggtgatgaagcagcccagatgtggagtgcctgatgtggctcagtttgtcctcactgaggggaaccctcgctgggagcaaacacatctgacctacaggattgaaaattacacgccagatttgccaagagcagatgtggaccatgccattgagaaagccttccaactctggagtaatgtcacacctctgacattcaccaaggtctctgagggtcaagcagacatcatgatatcttttgtcaggggagatcatcgggacaactctccttttgatggacctggaggaaatcttgctcatgcttttcaaccaggcccaggtattggaggggatgctcattttgatgaagatgaaaggtggaccaacaatttcagagagtacaacttacatcgtgttgcggctcatgaactcggccattctcttggactctcccattctactgatatcggggctttgatgtaccctagctacaccttcagtggtgatgttcagctagctcaggatgacattgatggcatccaagccatatatggacgttcccaaaatcctgtccagcccatcggcccacaaaccccaaaagcgtgtgacagtaagctaacctttgatgctataactacgattcggggagaagtgatgttctttaaagacagattctacatgcgcacaaatcccttctacccggaagttgagctcaatttcatttctgttttctggccacaactgccaaatgggcttgaagctgcttacgaatttgccgacagagatgaagtccggtttttcaaagggaataagtactgggctgttcagggacagaatgtgctacacggataccccaaggacatctacagctcctttggcttccctagaactgtgaagcatatcgatgctgctctttctgaggaaaacactggaaaaacctacttctttgttgctaacaaatactggaggtatgatgaatataaacgatctatggatccaggttatcccaaaatgatagcacatgactttcctggaattggccacaaagttgatgcagttttcatgaaagatggatttttctatttctttcatggaacaagacaatacaaatttgatcctaaaacgaagagaattttgactctccagaaagctaatagctggttcaactgcaggaaaaattgaacattactaatttgaatggaaaacacatggtgtgagtccaaagaaggtgttttcctgaagaactgtctattttctcagtcatttttaacctctagagtcactgatacacagaatataatcttatttatacctcagtttgcatatttttttactatttagaatgtagccctttttgtactgatataatttagttccacaaatggtgggtacaaaaagtcaagtttgtggcttatggattcatataggccagagttgcaaagatcttttccagagtatgcaactctgacgttgatcccagagagcagcttcagtgacaaacatatcctttcaagacagaaagagacaggagacatgagtctttgccggaggaaaagcagctcaagaacacatgtgcagtcactggtgtcaccctggataggcaagggataactcttctaacacaaaataagtgttttatgtttggaataaagtcaaccttgtttctactgtttt

SEQ ID NO: 7 - DNA, 1127 bp, Homo sapiens
accaaatcaaccataggtccaagaacaattgtctctggacggcagctatgcgactcaccgtgctgtgtgctgtgtgcctgctgcctggcagcctggccctgccgctgcctcaggaggcgggaggcatgagtgagctacagtgggaacaggctcaggactatctcaagagattttatctctatgactcagaaacaaaaaatgccaacagtttagaagccaaactcaaggagatgcaaaaattctttggcctacctataactggaatgttaaactcccgcgtcatagaaataatgcagaagcccagatgtggagtgccagatgttgcagaatactcactatttccaaatagcccaaaatggacttccaaagtggtcacctacaggatcgtatcatatactcgagacttaccgcatattacagtggatcgattagtgtcaaaggctttaaacatgtggggcaaagagatccccctgcatttcaggaaagttgtatggggaactgctgacatcatgattggctttgcgcgaggagctcatggggactcctacccatttgatgggccaggaaacacgctggctcatgcctttgcgcctgggacaggtctcggaggagatgctcacttcgatgaggatgaacgctggacggatggtagcagtctagggattaacttcctgtatgctgcaactcatgaacttggccattctttgggtatgggacattcctctgatcctaatgcagtgatgtatccaacctatggaaatggagatccccaaaattttaaactttcccaggatgatattaaaggcattcagaaactatatggaaagagaagtaattcaagaaagaaatagaaacttcaggcagaacatccattcattcattcattggattgtatatcattgttgcacaatcagaattgataagcactgttcctccactccatttagcaattatgtcacccttttttattgcagttggtttttgaatgtctttcactccttttattggttaaactcctttatggtgtgactgtgtcttattccatctatgagctttgtcagtgcgcgtagatgtcaataaatgttacatacacaaataaataaaatgtttattccatggtaaattta

SEQ ID NO: 8 - DNA, 1524 bp, Homo sapiens
gcagagcacagcatcgtcgggaccagactcgtctcaggccagttgcagccttctcagccaaacgccgaccaaggaaaactcactaccatgagaattgcagtgatttgcttttgcctcctaggcatcacctgtgccataccagttaaacaggctgattctggaagttctgaggaaaagcagctttacaacaaatacccagatgctgtggccacatggctaaaccctgacccatctcagaagcagaatctcctagccccacagacccttccaagtaagtccaacgaaagccatgaccacatggatgatatggatgatgaagatgatgatgaccatgtggacagccaggactccattgactcgaacgactctgatgatgtagatgacactgatgattctcaccagtctgatgagtctcaccattctgatgaatctgatgaactggtcactgattttcccacggacctgccagcaaccgaagttttcactccagttgtccccacagtagacacatatgatggccgaggtgatagtgtggtttatggactgaggtcaaaatctaagaagtttcgcagacctgacatccagtaccctgatgctacagacgaggacatcacctcacacatggaaagcgaggagttgaatggtgcatacaaggccatccccgttgcccaggacctgaacgcgccttctgattgggacagccgtgggaaggacagttatgaaacgagtcagctggatgaccagagtgctgaaacccacagccacaagcagtccagattatataagcggaaagccaatgatgagagcaatgagcattccgatgtgattgatagtcaggaactttccaaagtcagccgtgaattccacagccatgaatttcacagccatgaagatatgctggttgtagaccccaaaagtaaggaagaagataaacacctgaaatttcgtatttctcatgaattagatagtgcatcttctgaggtcaattaaaaggagaaaaaatacaatttctcactttgcatttagtcaaaagaaaaaatgctttatagcaaaatgaaagagaacatgaaatgcttctttctcagtttattggttgaatgtgtatctatttgagtctggaaataactaatgtgtttgataattagtttagtttgtggcttcatggaaactccctgtaaactaaaagcttcagggttatgtctatgttcattctatagaagaaatgcaaactatcactgtattttaatatttgttattctctcatgaatagaaatttatgtagaagcaaacaaaatacttttacccacttaaaaagagaatataacattttatgtcactataatcttttgttttttaagttagtgtatattttgttgtgattatctttttgtggtgtgaataaatcttttatcttgaatgtaataagaatttggtggtgtcaattgcttatttgttttcccacggttgtccagcaattaataaaacataaccttttttactgcctaaaaaaaaaaaaaaaaaaaa

SEQ ID NO: 9 - DNA, 1172 bp, Homo sapiens
gagacattcctcaattgcttagacatattctgagcctacagcagaggaacctccagtctcagcaccatgaatcaaactgcgattctgatttgctgccttatctttctgactctaagtggcattcaaggagtacctctctctagaaccgtacgctgtacctgcatcagcattagtaatcaacctgttaatccaaggtctttagaaaaacttgaaattattcctgcaagccaattttgtccacgtgttgagatcattgctacaatgaaaaagaagggtgagaagagatgtctgaatccagaatcgaaggccatcaagaatttactgaaagcagttagcaaggaaatgtctaaaagatctccttaaaaccagaggggagcaaaatcgatgcagtgcttccaaggatggaccacacagaggctgcctctcccatcacttccctacatggagtatatgtcaagccataattgttcttagtttgcagttacactaaaaggtgaccaatgatggtcaccaaatcagctgctactactcctgtaggaaggttaatgttcatcatcctaagctattcagtaataactctaccctggcactataatgtaagctctactgaggtgctatgttcttagtggatgttctgaccctgcttcaaatatttccctcacctttcccatcttccaagggtactaaggaatctttctgctttggggtttatcagaattctcagaatctcaaataactaaaaggtatgcaatcaaatctgctttttaaagaatgctctttacttcatggacttccactgccatcctcccaaggggcccaaattctttcagtggctacctacatacaattccaaacacatacaggaaggtagaaatatctgaaaatgtatgtgtaagtattcttatttaatgaaagactgtacaaagtataagtcttagatgtatatatttcctatattgttttcagtgtacatggaataacatgtaattaagtactatgtatcaatgagtaacaggaaaattttaaaaatacagatagatatatgctctgcatgttacataagataaatgtgctgaatggttttcaaataaaaatgaggtactctcctggaaatattaagaaagactatctaaatgttgaaagatcaaaaggttaataaagtaattataact

SEQ ID NO: 10 - DNA, 5699 bp, Homo sapiens
ggagttctcagacctccagtttcagccctgccctcagcctccaatccgtaagagacacccagccccagcaattggattgggcagcccgtcttgacacaccactgtgctgagtgcttgaggacgtgtttcaacagatggttggggttagtgtgtgtcatcacattcgagtggggattaagagaaggaaggctgccttgctggagctgtgtggtcttctccaagtgagagtcgcaggcaatagaactactttgcttttggaggaaaaggaggaattcattttcagcagacacaagaaaagcagtttttttttcagggattcttcacttctcttgaacaaggaactcactcagagactaacacaaaggaagtaatttcttacctggtcattatttagtctacaataagttcatccttcttcagtgtgaccagtaaattcttcccatactcttgaagagagcataattggaatggagaggtggtgctgacggccacccaccatcatctaaagaagataaacttggcaaatgacatgcaggttcttcaaggcagaataattgcagaaaatcttcaaaggaccctatctgcagatgttctgaatacctctgagaatagagattgattattcaaccaggatacctaattcaagaactccagaaatcaggagacggagacattttgtcagttttgcaacattggaccaaatacaatgaagtattcttgctgtgctctggttttggctgtcctgggcacagaattgctgggaagcctctgttcgactgtcagatccccgaggttcagaggacggatacagcaggaacgaaaaaacatccgacccaacattattcttgtgcctaccgatgatcaagatgtggagctggggtccctgcaagtcatgaacaaaacgagaaagattatggaacatgggggggccaccttcatcaatgcctttgtgactacacccatgtgctgcccgtcacggtcctccatgctcaccgggaagtatgtgcacaatcacaatgtctacaccaacaacgagaactgctcttccccctcgtggcaggccatgcatgagcctcggacttttgctgtatatcttaacaacactggctacagaacagccttttttggaaaatacctcaatgaatataatggcagctacatcccccctgggtggcgagaatggcttggattaatcaagaattctcgcttctataattacactgtttgtcgcaatggcatcaaagaaaagcatggatttgattatgcaaaggactacttcacagacttaatcactaacgagagcattaattacttcaaaatgtctaagagaatgtatccccataggcccgttatgatggtgatcagccacgctgcgccccacggccccgaggactcagccccacagttttctaaactgtaccccaatgcttcccaacacataactcctagttataactatgcaccaaatatggataaacactggattatgcagtacacaggaccaatgctgcccatccacatggaatttacaaacattctacagcgcaaaaggctccagactttgatgtcagtggatgattctgtggagaggctgtataacatgctcgtggagacgggggagctggagaatacttacatcatttacaccgccgaccatggttaccatattgggcagtttggactggtcaaggggaaatccatgccatatgactttgatattcgtgtgcctttttttattcgtggtccaagtgtagaaccaggatcaatagtcccacagatcgttctcaacattgacttggcccccacgatcctggatattgctgggctcgacacacctcctgatgtggacggcaagtctgtcctcaaacttctggacccagaaaagccaggtaacaggtttcgaacaaacaagaaggccaaaatttggcgtgatacattcctagtggaaagaggcaaatttctacgtaagaaggaagaatccagcaagaatatccaacagtcaaatcacttgcccaaatatgaacgggtcaaagaactatgccagcaggccaggtaccagacagcctgtgaacaaccggggcagaagtggcaatgcattgaggatacatctggcaagcttcgaattcacaagtgtaaaggacccagtgacctgctcacagtccggcagagcacgcggaacctctacgctcgcggcttccatgacaaagacaaagagtgcagttgtagggagtctggttaccgtgccagcagaagccaaagaaagagtcaacggcaattcttgagaaaccaggggactccaaagtacaagcccagatttgtccatactcggcagacacgttccttgtccgtcgaatttgaaggtgaaatatatgacataaatctggaagaagaagaagaattgcaagtgttgcaaccaagaaacattgctaagcgtcatgatgaaggccacaaggggccaagagatctccaggcttccagtggtggcaacaggggcaggatgctggcagatagcagcaacgccgtgggcccacctaccactgtccgagtgacacacaagtgttttattcttcccaatgactctatccattgtgagagagaactgtaccaatcggccagagcgtggaaggaccataaggcatacattgacaaagagattgaagctctgcaagataaaattaagaatttaagagaagtgagaggacatctgaagagaaggaagcctgaggaatgtagctgcagtaaacaaagctattacaataaagagaaaggtgtaaaaaagcaagagaaattaaagagccatcttcacccattcaaggaggctgctcaggaagtagatagcaaactgcaacttttcaaggagaacaaccgtaggaggaagaaggagaggaaggagaagagacggcagaggaagggggaagagtgcagcctgcctggcctcacttgcttcacgcatgacaacaaccactggcagacagccccgttctggaacctgggatctttctgtgcttgcacgagttctaacaataacacctactggtgtttgcgtacagttaatgagacgcataattttcttttctgtgagtttgctactggctttttggagtattttgatatgaatacagatccttatcagctcacaaatacagtgcacacggtagaacgaggcattttgaatcagctacacgtacaactaatggagctcagaagctgtcaaggatataagcagtgcaacccaagacctaagaatcttgatgttggaaataaagatggaggaagctatgacctacacagaggacagttatgggatggatgggaaggttaatcagccccgtctcactgcagacatcaactggcaaggcctagaggagctacacagtgtgaatgaaaacatctatgagtacagacaaaactacagacttagtctggtggactggactaattacttgaaggatttagatagagtatttgcactgctgaagagtcactatgagcaaaataaaacaaataagactcaaactgctcaaagtgacgggttcttggttgtctctgctgagcacgctgtgtcaatggagatggcctctgctgactcagatgaagacccaaggcataaggttgggaaaacacctcatttgaccttgccagctgaccttcaaaccctgcatttgaaccgaccaacattaagtccagagagtaaacttgaatggaataacgacattccagaagttaatcatttgaattctgaacactggagaaaaaccgaaaaatggacggggcatgaagagactaatcatctggaaaccgatttcagtggcgatggcatgacagagctagagctcgggcccagccccaggctgcagcccattcgcaggcacccgaaagaacttccccagtatggtggtcctggaaaggacatttttgaagatcaactatatcttcctgtgcattccgatggaatttcagttcatcagatgttcaccatggccaccgcagaacaccgaagtaattccagcatagcggggaagatgttgaccaaggtggagaagaatcacgaaaaggagaagtcacagcacctagaaggcagcgcctcctcttcactctcctctgattagatgaaactgttaccttaccctaaacacagtatttctttttaacttttttatttgtaaactaataaaggtaatcacagccaccaacattccaagctaccctgggtacctttgtgcagtagaagctagtgagcatgtgagcaagcggtgtgcacacggagactcatcgttataatttactatctgccaagagtagaaagaaaggctggggatatttgggttggcttggttttgattttttgcttgtttgtttgttttgtactaaaacagtattatcttttgaatatcgtagggacataagtatatacatgttatccaatcaagatggctagaatggtgcctttctgagtgtctaaaacttgacacccctggtaaatctttcaacacacttccactgcctgcgtaatgaagttttgattcatttttaaccactggaatttttcaatgccgtcattttcagttagatgattttgcactttgagattaaaatgccatgtctatttgattagtcttatttttttatttttacaggcttatcagtctcactgttggctgtcattgtgacaaagtcaaataaacccccaaggacgacacacagtatggatcacatattgtttgacattaagcttttgccagaaaatgttgcatgtgttttacctcgacttgctaaaatcgattagcagaaaggcatggctaataatgttggtggtgaaaataaataaataagtaaacaaaatgaagattgcctgctctctctgtgcctagcctcaaagcgttcatcatacatcatacctttaagattgctatattttgggttattttcttgacaggagaaaaagatctaaagatcttttattttcatcttttttggttttcttggcatgactaagaagcttaaatgttgataaaatatgactagttttgaatttacaccaagaacttctcaataaaagaaaatcatgaatgctccacaatttcaacataccacaagagaagttaatttcttaacattgtgttctatgattatttgtaagaccttcaccaagttctgatatcttttaaagacatagttcaaaattgcttttgaaaatctgtattcttgaaaatatccttgttgtgtattaggtttttaaataccagctaaaggattacctcactgagtcatcagtaccctcctattcagctccccaagatgatgtgtttttgcttaccctaagagaggttttcttcttatttttagataattcaagtgcttagataaattatgttttctttaagtgtttatggtaaactcttttaaagaaaatttaatatgttatagctgaatctttttggtaactttaaatctttatcatagactctgtacatatgttcaaattagctgcttgcctgatgtgtgtatcatcggtgggatgacagaacaaacatatttatgatcatgaataatgtgctttgtaaaaagatttcaagttattaggaagcatactctgttttttaatcatgtataatattccatgatacttttatagaacaattctggcttcaggaaagtctagaagcaatatttcttcaaataaaaggtgtttaaacttt

SEQ ID NO: 11 - DNA, 6217 bp, Homo sapiens
cgcagactgtgctggagctggtgctgaaaaagggggtttgcagaggctgccctggggctggtgctgaaagaagagcccacagctgacttcatggtgctacaataacctcagaatctacttttcactctcaggagaacccacagtctaatatttagacatgatggcaaactgggcggaagcaagacctctcctcattcttattgttttattagggcaatttgtctcaataaaagcccaggaagaagacgaggatgaaggatatggtgaagaaatagcctgcactcagaatggccagatgtacttaaacagggacatttggaaacctgccccttgtcagatctgtgtctgtgacaatggagccattctctgtgacaagatagaatgccaggatgtgctggactgtgccgaccctgtaacgccccctggggaatgctgtcctgtctgttcacaaacacctggaggtggcaatacaaattttggtagaggaagaaagggacaaaagggagaaccaggattagtgcctgttgtaacaggcatacgtggtcgtccaggaccggcaggacctccaggatcacagggaccaagaggagagcgagggccaaaaggaagacctggccctcgtggacctcagggaattgatggagaaccaggtgttcctggtcaacctggtgctccaggacctcctggacatccgtcccacccaggacccgatggcttgagcaggccgttttcagctcaaatggctgggttggatgaaaaatctggacttgggagtcaagtaggactaatgcctggctctgtgggtcctgttggcccaaggggaccacagggtttacaaggacagcaaggtggtgcaggacctacaggacctcctggtgaacctggtgatcctggaccaatgggtccgattggttcacgtggaccagagggccctcctggtaaacctggggaagatggtgaacctggcagaaatggaaatcctggtgaagtgggatttgcaggatctccgggagctcgtggatttcctggggctcctggtcttccaggtctgaagggtcaccgaggacacaaaggtcttgaaggccctaaaggtgaagttggagcacctggttccaagggtgaagctggccccactggtccaatgggtgccatgggtcctctgggtccgaggggaatgccaggagagagagggagacttgggccacagggtgctcctggacaacgaggtgcacatggtatgcctggaaaacctggaccaatgggtcctcttgggataccaggctcttctggttttccaggaaatcctggaatgaagggagaagcaggtcctacaggggcgcgaggccctgaaggtcctcaggggcagagaggtgaaactgggcccccaggtccagttggctctccaggtcttcctggtgcaataggaactgatggtactcctggtcccaaaggcccaacgggctctccgggtacctctggtcctcctggctcagcagggcctcctggatctccaggacctcagggtagcactggtcctcaggggaattcgggccttccgggtgatccaggtttcaaaggagaagctggcccaaaaggggaaccagggccacatggtattcagggtccgataggcccacccggtgaagaaggcaaaagaggtcccagaggtgacccaggaacacttggtcctccagggccagtgggagaaaggggtgctcctggcaatcgtggttttccaggctctgatggtttacctgggccaaagggtgctcaaggagaacggggtcctgtaggttcttcaggacccaaaggaagccagggggatccaggacgtccaggggaacctgggcttccaggtgctcggggtttgacaggaaatcctggtgttcaaggtcctgaaggaaaacttggacctttgggtgcgccaggggaagatggccgtccaggtcctccaggctccataggaatcaaagggcagcccgggaccatgggccttccaggccccaaaggtagcaatggtgaccctgggaaacctggagaagcaggaaatcctggagttcctgggcaaaggggagctcctggaaaagatggtaaagttggtccttatggtcctcctgggccgccgggtctacgtggtgaaagaggagaacaaggacctccagggcccacaggttttcaggggcatcctggtcctccaggtcctcctggagaaggtggaaaaccaggtgatcaaggtgttcctggaggtcccggagcagttggcccgttaggacctagaggagaacgaggaaatcctggggaaagaggagaacctgggataactggactccctggtgagaagggaatggctggaggacatggtcctgatggcccaaaaggcagtccaggtccatctgggacccctggagatacaggcccaccaggtcttcaaggtatgccgggagaaagaggaattgcaggaactcctggccccaagggtgacagaggtggcataggagaaaaaggtgctgaaggcacagctggaaatgatggtgcaggaggtcttccaggtcctttgggccctccaggtccggcaggcctactgggagaaaagggtgaacctggtcctcgaggtttagttggtcctcctggctcccggggcaatcctggttctcgaggtgaaaatgggccaactggagctgttggttttgccggaccccaggggtctgacggacagcctggagtaaaaggtgaacctggagagccaggacagaagggagatgctggttctcctggaccacaaggtttagcaggatcccctggccctcatggtcctaatggtgttcctggactaaaaggtggtcgaggaacccaaggtccgcctggtgctacaggatttcctggttctgcgggcagagttggacctccaggccctgctggagctccaggacctgcgggacccctaggggaacccgggaaggagggacctccaggtcctcgtggggaccctggctctcatgggcgtgtgggagtccgaggaccagctggcccccctggtggcccaggagacaaaggggacccaggagaagatgggcaacctggtccagatggcccccctggtccagctggaacgaccgggcagagaggaattgttggcatgcctgggcaacgtggagagagaggcatgcccggcctaccaggcccagcgggaacaccaggaaaagtaggaccaactggtgcaacaggagataaaggtccacctggacctgtggggcccccaggctccaatggtcctgtaggggaacctggaccagaaggtccagctggcaatgatggtaccccaggacgggatggtgctgttggagaacgtggtgatcgtggagaccctgggcctgcaggtctgccaggctctcagggtgcccctggaactcctggccctgtgggtgctccaggagatgcaggacaaagaggagatccgggttctcggggtcctataggacacctgggtcgagctggaaaacgtggattacctggaccccaaggacctcgtggtgacaaaggtgatcatggagaccgaggcgacagaggtcagaagggccacagaggctttactggtcttcagggtcttcctggccctcctggtccaaatggtgaacaaggaagtgctggaatccctggaccatttggcccaagaggtcctccaggcccagttggtccttcaggtaaagaaggaaaccctgggccacttgggccattgggacctccaggtgtacgaggcagtgtaggagaagcaggacctgagggccctcctggtgagcctggcccacctggccctccgggtccccctggccaccttacagctgctcttggggatatcatggggcactatgatgaaagcatgccagatccacttcctgagtttactgaagatcaggcggctcctgatgacaaaaacaaaacggacccaggggttcatgctaccctgaagtcactcagtagtcagattgaaaccatgcgcagccccgatggctcgaaaaagcacccagcccgcacgtgtgatgacctaaagctttgccattccgcaaagcagagtggtgaatactggattgatcctaaccaaggatctgttgaagatgccatcaaagtttactgcaacatggaaacaggagaaacatgtatttcagcaaacccatccagtgtaccacgtaaaacctggtgggccagtaaatctcctgacaataaacctgtttggtatggtcttgatatgaacagagggtctcagttcgcttatggagaccaccaatcacctaatacagccattactcagatgacttttttgcgccttttatcaaaagaagcctcccagaacatcacttacatctgtaaaaacagtgtaggatacatggacgatcaagctaagaacctcaaaaaagctgtggttctcaaaggggcaaatgacttagatatcaaagcagagggaaatattagattccggtatatcgttcttcaagacacttgctctaagcggaatggaaatgtgggcaagactgtctttgaatatagaacacagaatgtggcacgcttgcccatcatagatcttgctcctgtggatgttggcggcacagaccaggaattcggcgttgaaattgggccagtttgttttgtgtaaagtaagccaagacacatcgacaatgagcaccaccatcaatgaccaccgccattcacaagaactttgactgtttgaagttgatcctgagactcttgaagtaatggctgatcctgcatcagcattgtatatatggtcttaagtgcctggcctccttatccttcagaatatttattttacttacaatcctcaagttttaattgattttaaatatttttcaatacaacagtttaggtttaagatgaccaatgacaatgaccacctttgcagaaagtaaactgattgaataaataaatctccgttttcttcaatttatttcagtgtaatgaaaaagttgcttagtatttatgaggaaattcttcttcctggcaggtagcttaaagagtggggtatatagagccacaacacatgtttattttgcttggctgcagttgaaaaatagaaattagtgcccttttgtgacctctcattccaagattgtcaattaaaaatgagtttaaaatgtttaacttgtgatcgagacctacatgcatgtcttgatattgtgtaactataatagagactctttaaggagaatcttaaaaaaaaaaaacgtttctcactgtcttaaatagaatttttaaatagtatatattcagtggcattttggagaacaaagtgaatttacttcgacttcttaaatttttgtaaaagactataagtttagacatctttctcattcaaatttaaagatatctttctcctcttgatcaatctatcaatattgatagaagtcacactagtatataccatttaatacatttacactttcttatttaagaagatattgaatgcaaaataattgacatatagaactttacaaacatatgtccaaggactctaaattgagactcttccacatgtacaatctcatcatcctgaagcctataatgaagaaaaagatctagaaactgagttgtggagctgactctaatcaaatgtgatgattggaattagaccatttggcctttgaactttcataggaaaaatgacccaacatttcttagcatgagctacctcatctctagaagctgggatggacttactattcttgtttatattttagatactgaaaggtgctatgcttctgttattattccaagactggagataggcagggctaaaaaggtattattatttttcctttaatgatggtgctaaaattcttcctataaaattccttaaaaataaagatggtttaatcactaccattgtgaaaacataactgttagacttcccgtttctgaaagaaagagcatcgttccaatgcttgttcactgttcctctgtcatactgtatctggaatgctttgtaatacttgcatgcttcttagaccagaacatgtaggtccccttgtgtctcaatactttttttttcttaattgcatttgttggctctattttaatttttttcttttaaaataaacagctgggaccatcccaaaagacaagccatgcatacaactttggtcatgtatctctgcaaagcatcaaattaaatgcacgcttttgtcatgtcaaaaaaaaaaaaaaa

SEQ ID NO: 12 - DNA, 1103 bp, Homo sapiens
cacagagcccgggccgcaggcacctcctcgccagctcttccgctcctctcacagccgccagacccgcctgctgagccccatggcccgcgctgctctctccgccgcccccagcaatccccggctcctgcgagtggcactgctgctcctgctcctggtagccgctggccggcgcgcagcaggagcgtccgtggccactgaactgcgctgccagtgcttgcagaccctgcagggaattcaccccaagaacatccaaagtgtgaacgtgaagtcccccggaccccactgcgcccaaaccgaagtcatagccacactcaagaatgggcggaaagcttgcctcaatcctgcatcccccatagttaagaaaatcatcgaaaagatgctgaacagtgacaaatccaactgaccagaagggaggaggaagctcactggtggctgttcctgaaggaggccctgcccttataggaacagaagaggaaagagagacacagctgcagaggccacctggattgtgcctaatgtgtttgagcatcgcttaggagaagtcttctatttatttatttattcattagttttgaagattctatgttaatattttaggtgtaaaataattaagggtatgattaactctacctgcacactgtcctattatattcattctttttgaaatgtcaaccccaagttagttcaatctggattcatatttaatttgaaggtagaatgttttcaaatgttctccagtcattatgttaatatttctgaggagcctgcaacatgccagccactgtgatagaggctggcggatccaagcaaatggccaatgagatcattgtgaaggcaggggaatgtatgtgcacatctgttttgtaactgtttagatgaatgtcagttgttatttattgaaatgatttcacagtgtgtggtcaacatttctcatgttgaaactttaagaactaaaatgttctaaatatcccttggacattttatgtctttcttgtaaggcatactgccttgtttaatggtagttttacagtgtttctggcttagaacaaaggggcttaattattgatgttttcatagagaatataaaaataaagcacttatag

SEQ ID NO: 13 - DNA, 793 bp, Homo sapiens
aggagttgtgagtttccaagccccagctcactctgaccacttctctgcctgcccagcatcatgaagggccttgcagctgccctccttgtcctcgtctgcaccatggccctctgctcctgtgcacaagttggtaccaacaaagagctctgctgcctcgtctatacctcctggcagattccacaaaagttcatagttgactattctgaaaccagcccccagtgccccaagccaggtgtcatcctcctaaccaagagaggccggcagatctgtgctgaccccaataagaagtgggtccagaaatacatcagcgacctgaagctgaatgcctgaggggcctggaagctgcgagggcccagtgaacttggtgggcccaggagggaacaggagcctgagccagggcaatggccctgccaccctggaggccacctcttctaagagtcccatctgctatgcccagccacattaactaactttaatcttagtttatgcatcatatttcattttgaaattgatttctattgttgagctgcattatgaaattagtattttctctgacatctcatgacattgtctttatcatcctttcccctttcccttcaactcttcgtacattcaatgcatggatcaatcagtgtgattagctttctcagcagacattgtgccatatgtatcaaatgacaaatctttattgaatggttttgctcagcaccaccttttaatatattggcagtacttattatataaaaggtaaaccagcattctcactgtgaaaaaaaaaaaaaaaaaaaaaaaa

SEQ ID NO: 14 - DNA, 3654 bp, Homo sapiens
agatgccgcgggggccgctcgcagccgccgctgacttgtgaatgggaccgggactggggccgggactgacaccgcagcgcttgccctgcgccagggactggcggctcggaggttgcgtccaccctcaagggccccagaaatcactgtgttttcagctcagcggccctgtgacattccttcgtgttgtcatttgttgagtgaccaatcagatgggtggagtgtgttacagaaattggcagcaagtatccaatgggtgaagaagaagctaactggggacgtgggcagccctgacgtgatgagctcaaccagcagagacattccatcccaagagaggtctgcgtgacgcgtccgggaggccaccctcagcaagaccaccgtacagttggtggaaggggtgacagctgcattctcctgtgcctaccacgtaaccaaaaatgaaggagaactactgtttacaagccgccctggtgtgcctgggcatgctgtgccacagccatgcctttgccccagagcggcgggggcacctgcggccctccttccatgggcaccatgagaagggcaaggaggggcaggtgctacagcgctccaagcgtggctgggtctggaaccagttcttcgtgatagaggagtacaccgggcctgaccccgtgcttgtgggcaggcttcattcagatattgactctggtgatgggaacattaaatacattctctcaggggaaggagctggaaccatttttgtgattgatgacaaatcagggaacattcatgccaccaagacgttggatcgagaagagagagcccagtacacgttgatggctcaggcggtggacagggacaccaatcggccactggagccaccgtcggaattcattgtcaaggtccaggacattaatgacaaccctccggagttcctgcacgagacctatcatgccaacgtgcctgagaggtccaatgtgggaacgtcagtaatccaggtgacagcttcagatgcagatgaccccacttatggaaatagcgccaagttagtgtacagtatcctcgaaggacaaccctatttttcggtggaagcacagacaggtatcatcagaacagccctacccaacatggacagggaggccaaggaggagtaccacgtggtgatccaggccaaggacatgggtggacatatgggcggactctcagggacaaccaaagtgacgatcacactgaccgatgtcaatgacaacccaccaaagtttccgcagagcgtataccagatgtctgtgtcagaagcagccgtccctggggaggaagtaggaagagtgaaagctaaagatccagacattggagaaaatggcttagtcacatacaatattgttgatggagatggtatggaatcgtttgaaatcacaacggactatgaaacacaggagggggtgataaagctgaaaaagcctgtagattttgaaaccaaaagagcctatagcttgaaggtagaggcagccaacgtgcacatcgacccgaagtttatcagcaatggccctttcaaggacactgtgaccgtcaagatctcagtagaagatgctgatgagccccctatgttcttggccccaagttacatccacgaagtccaagaaaatgcagctgctggcaccgtggttgggagagtgcatgccaaagaccctgatgctgccaacagcccgataaggtattccatcgatcgtcacactgacctcgacagatttttcactattaatccagaggatggttttattaaaactacaaaacctctggatagagaggaaacagcctggctcaacatcactgtctttgcagcagaaatccacaatcggcatcaggaagccaaagtcccagtggccattagggtccttgatgtcaacgataatgctcccaagtttgctgccccttatgaaggtttcatctgtgagagtgatcagaccaagccactttccaaccagccaattgttacaattagtgcagatgacaaggatgacacggccaatggaccaagatttatcttcagcctaccccctgaaatcattcacaatccaaatttcacagtcagagacaaccgagataacacagcaggcgtgtacgcccggcgtggagggttcagtcggcagaagcaggacttgtaccttctgcccatagtgatcagcgatggcggcatcccgcccatgagtagcaccaacaccctcaccatcaaagtctgcgggtgcgacgtgaacggggcactgctctcctgcaacgcagaggcctacattctgaacgccggcctgagcacaggcgccctgatcgccatcctcgcctgcatcgtcattctcctggtcattgtagtattgtttgtgaccctgagaaggcaaaagaaagaaccactcattgtctttgaggaagaagatgtccgtgagaacatcattacttatgatgatgaagggggtggggaagaagacacagaagcctttgatattgccaccctccagaatcctgatggtatcaatggatttatcccccgcaaagacatcaaacctgagtatcagtacatgcctagacctgggctccggccagcgcccaacagcgtggatgtcgatgacttcatcaacacgagaatacaggaggcagacaatgaccccacggctcctccttatgactccattcaaatctacggttatgaaggcaggggctcagtggccgggtccctgagctccctagagtcggccaccacagattcagacttggactatgattatctacagaactggggacctcgttttaagaaactagcagatttgtatggttccaaagacacttttgatgacgattcttaacaataacgatacaaatttggccttaagaactgtgtctggcgttctcaagaatctagaagatgtgtaaacaggtatttttttaaatcaaggaaaggctcatttaaaacaggcaaagttttacagagaggatacatttaataaaactgcgaggacatcaaagtggtaaatactgtgaaataccttttctcacaaaaaggcaaatattgaagttgtttatcaacttcgctagaaaaaaaaaacacttggcatacaaaatatttaagtgaaggagaagtctaacgctgaactgacaatgaagggaaattgtttatgtgttatgaacatccaagtctttcttcttttttaagttgtcaaagaagcttccacaaaattagaaaggacaacagttctgagctgtaatttcgccttaaactctggacactctatatgtagtgcatttttaaacttgaaatatataatattcagccagcttaaacccatacaatgtatgtacaatacaatgtacaattatgtctcttgagcatcaatcttgttactgctgattcttgtaaatctttttgcttctactttcatcttaaactaatacgtgccagatataactgtcttgtttcagtgagagacgccctatttctatgtcatttttaatgtatctatttgtacaattttaaagttcttattttagtatacgtataaatatcagtattctgacatgtaagaaaatgttacggcatcacacttatattttatgaacattgtactgttgctttaatatgagcttcaatataagaagcaatctttgaaataaaaaaagatttttttttaaaaaaaa

SEQ ID NO: 15 - DNA, 983 bp, Homo sapiens
gtggaattcatggcatctacttcgtatgactattgcagagtgcccatggaagacggggataagcgctgtaagcttctgctggggataggaattctggtgctcctgatcatcgtgattctgggggtgcccttgattatcttcaccatcaaggccaacagcgaggcctgccgggacggccttcgggcagtgatggagtgtcgcaatgtcacccatctcctgcaacaagagctgaccgaggcccagaagggctttcaggatgtggaggcccaggccgccacctgcaaccacactgtgatggccctaatggcttccctggatgcagagaaggcccaaggacaaaagaaagtggaggagcttgagggagagatcactacattaaaccataagcttcaggacgcgtctgcagaggtggagcgactgagaagagaaaaccaggtcttaagcgtgagaatcgcggacaagaagtactaccccagctcccaggactccagctccgctgcggcgccccagctgctgattgtgctgctgggcctcagcgctctgctgcagtgagatcccaggaagctggcacatcttggaaggtccgtcctgctcggcttttcgcttgaacattcccttgatctcatcagttctgagcgggtcatggggcaacacggttagcggggagagcacggggtagccggagaagggcctctggagcaggtctggaggggccatggggcagtcctgggtgtggggacacagtcgggttgacccagggctgtctccctccagagcctccctccggacaatgagtcccccctcttgtctcccaccctgagattgggcatggggtgcggtgtggggggcatgtgctgcctgttgttatgggttttttttgcggggggggttgcttttttctggggtctttgagctccaaaaaataaacacttcctttgagggagagcaaaaaaaaaaaaaaaaaaaaaaaaaaaaaaaaaaaa

SEQ ID NO: 16 - DNA, 2257 bp, Homo sapiens
gtgcgatcccgggcccgagggcatcagacggcggctgattagctccggtttgcatcacccggaccgggggattagctccggtttgcatcacccggaccgggggccgggcgcgcacgagactcgcagcggaagtggaggcggctccgcgcgcgtccgctgctaggacccgggcagggctggagctgggctgggatcccgagctcggcagcagcgcagcgggccggcccacctgctggtgccctggaggctctgagccccggcggcgcccgggcccacgcggaacgacggggcgagatgcgagccacccctctagctgctcctgcgggttccctgtccaggaagaagcggttggagttggatgacaacttagataccgagcgtcccgtccagaaacgagctcgaagtgggccccagcccagactgcccccctgcctgttgcccctgagcccacctactgctccagatcgtgcaactgctgtggccactgcctcccgtcttgggccctatgtcctcctggagcccgaggagggcgggcgggcctaccaggccctgcactgccctacaggcactgagtatacctgcaaggtgtaccccgtccaggaagccccggccgtgctggagccctatgcgcggctgcccccgcacaagcatgtggctcggcccactgaggtcctggctggtacccagctcctctacgcctttttcactcggacccatggggacatgcacagcctggtgcgaagccgccaccgtatccctgagcctgaggctgccgtgctcttccgccagatggccaccgccctggcgcactgtcaccagcacggtctggtcctgcgtgatctcaagctgtgtcgctttgtcttcgctgaccgtgagaggaagaagctggtgctggagaacctggaggactcctgcgtgctgactgggccagatgattccctgtgggacaagcacgcgtgcccagcctacgtgggacctgagatactcagctcacgggcctcatactcgggcaaggcagccgatgtctggagcctgggcgtggcgctcttcaccatgctggccggccactaccccttccaggactcggagcctgtcctgctcttcggcaagatccgccgcggggcctacgccttgcctgcaggcctctcggcccctgcccgctgtctggttcgctgcctccttcgtcgggagccagctgaacggctcacagccacaggcatcctcctgcacccctggctgcgacaggacccgatgcccttagccccaacccgatcccatctctgggaggctgcccaggtggtccctgatggtctggggctggacgaagccagggaagaggagggagacagagaagtggttctgtatggctaggaccaccctactacacgctcagctgccaacagtggattgagtttgggggtagctccaagccttctcctgcctctgaactgagccaaaccttcagtgccttccagaagggagaaaggcagaagcctgtgtggagtgtgctgtgtacacatctgctttgttccacacacatgcagttcctgcttgggtgcttatcaggtgccaagccctgttctcggtgctgggagtacagcagtgagcaaaggagacaatattccctgctcacagagatgacaaactggcatccttgagctgacaacacttttccatgaccataggtcactgtctacactgggtacactttgtaccagtgtcggcctccactgatgctggtgctcaggcacctctgtccaaggacaatccctttcacaaacaaaccagctgcctttgtatcttgtaccttttcagagaaagggaggtatccctgtgccaaaggctccaggcctctcccctgcaactcaggacccaagcccagctcactctgggaactgtgttcccagcatctctgtcctcttgattaagagattctccttccaggcctaagcctgggatttgggccagagataagaatccaaactatgaggctagttcttgtctaactcaagactgttctggaatgagggtccaggcctgtcaaccatggggcttctgacctgagcaccaaggttgagggacaggattaggcagggtctgtcctgtggccacctggaaagtcccaggtgggactcttctggggacacttggggtccacaatcccaggtccatactctaggttttggataccatgagtatgtatgtttacctgtgcctaataaaggagaattatgaaataaaaaaaaaaaaaaaaaaa

SEQ ID NO: 17 - DNA, 5784 bp, Homo sapiens
acggcatccagtacagaggggctggacttggacccctgcagcagccctgcacaggagaagcggcatataaagccgcgctgcccgggagccgctcggccacgtccaccggagcatcctgcactgcagggccggtctctcgctccagcagagcctgcgcctttctgactcggtccggaacactgaaaccagtcatcactgcatctttttggcaaaccaggagctcagctgcaggaggcaggatggtctggaggctggtcctgctggctctgtgggtgtggcccagcacgcaagctggtcaccaggacaaagacacgaccttcgaccttttcagtatcagcaacatcaaccgcaagaccattggcgccaagcagttccgcgggcccgaccccggcgtgccggcttaccgcttcgtgcgctttgactacatcccaccggtgaacgcagatgacctcagcaagatcaccaagatcatgcggcagaaggagggcttcttcctcacggcccagctcaagcaggacggcaagtccaggggcacgctgttggctctggagggccccggtctctcccagaggcagttcgagatcgtctccaacggccccgcggacacgctggatctcacctactggattgacggcacccggcatgtggtctccctggaggacgtcggcctggctgactcgcagtggaagaacgtcaccgtgcaggtggctggcgagacctacagcttgcacgtgggctgcgacctcataggaccagttgctctggacgagcccttctacgagcacctgcaggcggaaaagagccggatgtacgtggccaaaggctctgccagagagagtcacttcaggggtttgcttcagaacgtccacctagtgtttgaaaactctgtggaagatattctaagcaagaagggttgccagcaaggccagggagctgagatcaacgccatcagtgagaacacagagacgctgcgcctgggtccgcatgtcaccaccgagtacgtgggccccagctcggagaggaggcccgaggtgtgcgaacgctcgtgcgaggagctgggaaacatggtccaggagctctcggggctccacgtcctcgtgaaccagctcagcgagaacctcaagagagtgtcgaatgataaccagtttctctgggagctcattggtggccctcctaagacaaggaacatgtcagcttgctggcaggatggccggttctttgcggaaaatgaaacgtgggtggtggacagctgcaccacgtgtacctgcaagaaatttaaaaccatttgccaccaaatcacctgcccgcctgcaacctgcgccagtccatcctttgtggaaggcgaatgctgcccttcctgcctccactcggtggacggtgaggagggctggtctccgtgggcagagtggacccagtgctccgtgacgtgtggctctgggacccagcagagaggccggtcctgtgacgtcaccagcaacacctgcttggggccctcgatccagacacgggcttgcagtctgagcaagtgtgacacccgcatccggcaggacggcggctggagccactggtcaccttggtcttcatgctctgtgacctgtggagttggcaatatcacacgcatccgtctctgcaactccccagtgccccagatggggggcaagaattgcaaagggagtggccgggagaccaaagcctgccagggcgccccatgcccaatcgatggccgctggagcccctggtccccgtggtcggcctgcactgtcacctgtgccggtgggatccgggagcgcacccgggtctgcaacagccctgagcctcagtacggagggaaggcctgcgtgggggatgtgcaggagcgtcagatgtgcaacaagaggagctgccccgtggatggctgtttatccaacccctgcttcccgggagcccagtgcagcagcttccccgatgggtcctggtcatgcggcttctgccctgtgggcttcttgggcaatggcacccactgtgaggacctggacgagtgtgccctggtccccgacatctgcttctccaccagcaaggtgcctcgctgtgtcaacactcagcctggcttccactgcctgccctgcccgccccgatacagagggaaccagcccgtcggggtcggcctggaagcagccaagacggaaaagcaagtgtgtgagcccgaaaacccatgcaaggacaagacacacaactgccacaagcacgcggagtgcatctacctgggtcacttcagcgaccccatgtacaagtgcgagtgccagacaggctacgcgggcgacgggctcatctgcggggaggactcggacctggacggctggcccaacctcaatctggtctgcgccaccaacgccacctaccactgcatcaaggataactgcccccatctgccaaattctgggcaggaagactttgacaaggacgggattggcgatgcctgtgatgatgacgatgacaatgacggtgtgaccgatgagaaggacaactgccagctcctcttcaatccccgccaggctgactatgacaaggatgaggttggggaccgctgtgacaactgcccttacgtgcacaaccctgcccagatcgacacagacaacaatggagagggtgacgcctgctccgtggacattgatggggacgatgtcttcaatgaacgagacaattgtccctacgtctacaacactgaccagagggacacggatggtgacggtgtgggggatcactgtgacaactgccccctggtgcacaaccctgaccagaccgacgtggacaatgaccttgttggggaccagtgtgacaacaacgaggacatagatgacgacggccaccagaacaaccaggacaactgcccctacatctccaacgccaaccaggctgaccatgacagagacggccagggcgacgcctgtgaccctgatgatgacaacgatggcgtccccgatgacagggacaactgccggcttgtgttcaacccagaccaggaggacttggacggtgatggacggggtgatatttgtaaagatgattttgacaatgacaacatcccagatattgatgatgtgtgtcctgaaaacaatgccatcagtgagacagacttcaggaacttccagatggtccccttggatcccaaagggaccacccaaattgatcccaactgggtcattcgccatcaaggcaaggagctggttcagacagccaactcggaccccggcatcgctgtaggttttgacgagtttgggtctgtggacttcagtggcacattctacgtaaacactgaccgggacgacgactatgctggcttcgtctttggttaccagtcaagcagccgcttctatgtggtgatgtggaagcaggtgacgcagacctactgggaggaccagcccacgcgggcctatggctactccggcgtgtccctcaaggtggtgaactccaccacggggacgggcgagcacctgaggaacgcgctgtggcacacggggaacacgccggggcaggtgcgaaccttatggcacgaccccaggaacattggctggaaggactacacggcctataggtggcacctgactcacaggcccaagaccggctacatcagagtcttagtgcatgaaggaaaacaggtcatggcagactcaggacctatctatgaccaaacctacgctggcgggcggctgggtctatttgtcttctctcaagaaatggtctatttctcagacctcaagtacgaatgcagagatatttaaacaagatttgctgcatttccggcaatgccctgtgcatgccatggtccctagacacctcagttcattgtggtccttgcggcttctctctctagcagcacctcctgtcccttgaccttaactctgatggttcttcacctcctgccagcaaccccaaacccaagtgccttcagaggataaatatcaatggaactcagagatgaacatctaacccactagaggaaaccagtttggtgatatatgagactttatgtggagtgaaaattgggcatgccattacattgctttttcttgtttgtttaaaaagaatgacgtttacatataaaatgtaattacttattgtatttatgtgtatatggagttgaagggaatactgtgcataagccattatgataaattaagcatgaaaaatattgctgaactacttttggtgcttaaagttgtcactattcttgaattagagttgctctacaatgacacacaaatcccgctaaataaattataaacaagggtcaattcaaatttgaagtaatgttttagtaaggagagattagaagacaacaggcatagcaaatgacataagctaccgattaactaatcggaacatgtaaaacagttacaaaaataaacgaactctcctcttgtcctacaatgaaagccctcatgtgcagtagagatgcagtttcatcaaagaacaaacatccttgcaaatgggtgtgacgcggttccagatgtggatttggcaaaacctcatttaagtaaaaggttagcagagcaaagtgcggtgctttagctgctgcttgtgccgttgtggcgtcggggaggctcctgcctgagcttccttccccagctttgctgcctgagaggaaccagagcagacgcacaggccggaaaaggcgcatctaacgcgtatctaggctttggtaactgcggacaagttgcttttacctgatttgatgatacatttcattaaggttccagttataaatattttgttaatatttattaagtgactatagaatgcaactccatttaccagtaacttattttaaatatgcctagtaacacatatgtagtataatttctagaaacaaacatctaataagtatataatcctgtgaaaatatgaggcttgataatattaggttgtcacgatgaagcatgctagaagctgtaacagaatacatagagaataatgaggagtttatgatggaaccttaatatataatgttgccagcgattttagttcaatatttgttactgttatctatctgctgtatatggaattcttttaattcaaacgctgaaaacgaatcagcatttagtcttgccaggcacacccaataatcagtcatgtgtaatatgcacaagtttgtttttgtttttgttttttttgttggttggtttttttgctttaagttgcatgatctttctgcaggaaatagtcactcatcccactccacataaggggtttagtaagagaagtctgtctgtctgatgatggatagggggcaaatctttttcccctttctgttaatagtcatcacatttctatgccaaacaggaacgatccataactttagtcttaatgtacacattgcattttgataaaattaattttgttgtttcctttgaggttgatcgttgtgttgttttgctgcactttttacttttttgcgtgtggagctgtattcccgagacaacgaagcgttgggatacttcattaaatgtagcgactgtcaacagcgtgcaggttttctgtttctgtgttgtggggtcaaccgtacaatggtgtgggaatgacgatgatgtgaatatttagaatgtaccatattttttgtaaattatttatgtttttctaaacaaatttatcgtataggttgatgaaacgtcatgtgttttgccaaagactgtaaatatttatttatgtgttcacatggtcaaaatttcaccactgaaaccctgcacttagctagaacctcatttttaaagattaacaacaggaaataaattgtaaaaaaggttttct

SEQ ID NO: 18 - DNA, 841 bp, Homo sapiens
gaaccgtttactcgctgctgtgcccatctatcagcaggctccgggctgaagattgcttctcttctctcctccaaggtctagtgacggagcccgcgcgcggcgccaccatgcggcagaaggcggtatcgcttttcttgtgctacctgctgctcttcacttgcagtggggtggaggcaggtgagaatgcgggtaaggatgcaggtaagaaaaagtgctcggagagctcggacagcggctccgggttctggaaggccctgaccttcatggccgtcggaggaggactcgcagtcgccgggctgcccgcgctgggcttcaccggcgccggcatcgcggccaactcggtggctgcctcgctgatgagctggtctgcgatcctgaatgggggcggcgtgcccgccggggggctagtggccacgctgcagagcctcggggctggtggcagcagcgtcgtcataggtaatattggtgccctgatgggctacgccacccacaagtatctcgatagtgaggaggatgaggagtagccagcagctcccagaacctcttcttccttcttggcctaactcttccagttaggatctagaactttgcctttttttttttttttttttttttttgagatgggttctcactatattgtccaggctagagtgcagtggctattcacagatgcgaacatagtacactgcagcctccaactcctagcctcaagtgatcctcctgtctcaacctcccaagtaggattacaagcatgcgccgacgatgcccagaatccagaactttgtctatcactctccccaacaacctagatgtgaaaacagaataaacttcacccagaaaa

SEQ ID NO: 19 - DNA, 555 bp, Homo sapiens
atgagccgcacagcctacacggtgggagccctgcttctcctcttggggaccctgctgccggctgctgaagggaaaaagaaagggtcccaaggtgccatccccccgccagacaaggcccagcacaatgactcagagcagactcagtcgccccagcagcctggctccaggaaccgggggcggggccaagggcggggcactgccatgcccggggaggaggtgctggagtccagccaagaggccctgcatgtgacggagcgcaaatacctgaagcgagactggtgcaaaacccagccgcttaagcagaccatccacgaggaaggctgcaacagtcgcaccatcatcaaccgcttctgttacggccagtgcaactctttctacatccccaggcacatccggaaggaggaaggttcctttcagtcctgctccttctgcaagcccaagaaattcactaccatgatggtcacactcaactgccctgaactacagccacctaccaagaagaagagagtcacacgtgtgaagcagtgtcgttgcatatccatcgatttggattaa

SEQ ID NO: 20 - DNA, 2334 bp, Homo sapiens
agacacctctgccctcaccatgagcctctggcagcccctggtcctggtgctcctggtgctgggctgctgctttgctgcccccagacagcgccagtccacccttgtgctcttccctggagacctgagaaccaatctcaccgacaggcagctggcagaggaatacctgtaccgctatggttacactcgggtggcagagatgcgtggagagtcgaaatctctggggcctgcgctgctgcttctccagaagcaactgtccctgcccgagaccggtgagctggatagcgccacgctgaaggccatgcgaaccccacggtgcggggtcccagacctgggcagattccaaacctttgagggcgacctcaagtggcaccaccacaacatcacctattggatccaaaactactcggaagacttgccgcgggcggtgattgacgacgcctttgcccgcgccttcgcactgtggagcgcggtgacgccgctcaccttcactcgcgtgtacagccgggacgcagacatcgtcatccagtttggtgtcgcggagcacggagacgggtatcccttcgacgggaaggacgggctcctggcacacgcctttcctcctggccccggcattcagggagacgcccatttcgacgatgacgagttgtggtccctgggcaagggcgtcgtggttccaactcggtttggaaacgcagatggcgcggcctgccacttccccttcatcttcgagggccgctcctactctgcctgcaccaccgacggtcgctccgacggcttgccctggtgcagtaccacggccaactacgacaccgacgaccggtttggcttctgccccagcgagagactctacacccgggacggcaatgctgatgggaaaccctgccagtttccattcatcttccaaggccaatcctactccgcctgcaccacggacggtcgctccgacggctaccgctggtgcgccaccaccgccaactacgaccgggacaagctcttcggcttctgcccgacccgagctgactcgacggtgatggggggcaactcggcgggggagctgtgcgtcttccccttcactttcctgggtaaggagtactcgacctgtaccagcgagggccgcggagatgggcgcctctggtgcgctaccacctcgaactttgacagcgacaagaagtggggcttctgcccggaccaaggatacagtttgttcctcgtggcggcgcatgagttcggccacgcgctgggcttagatcattcctcagtgccggaggcgctcatgtaccctatgtaccgcttcactgaggggccccccttgcataaggacgacgtgaatggcatccggcacctctatggtcctcgccctgaacctgagccacggcctccaaccaccaccacaccgcagcccacggctcccccgacggtctgccccaccggaccccccactgtccacccctcagagcgccccacagctggccccacaggtcccccctcagctggccccacaggtccccccactgctggcccttctacggccactactgtgcctttgagtccggtggacgatgcctgcaacgtgaacatcttcgacgccatcgcggagattgggaaccagctgtatttgttcaaggatgggaagtactggcgattctctgagggcagggggagccggccgcagggccccttccttatcgccgacaagtggcccgcgctgccccgcaagctggactcggtctttgaggagccgctctccaagaagcttttcttcttctctgggcgccaggtgtgggtgtacacaggcgcgtcggtgctgggcccgaggcgtctggacaagctgggcctgggagccgacgtggcccaggtgaccggggccctccggagtggcagggggaagatgctgctgttcagcgggcggcgcctctggaggttcgacgtgaaggcgcagatggtggatccccggagcgccagcgaggtggaccggatgttccccggggtgcctttggacacgcacgacgtcttccagtaccgagagaaagcctatttctgccaggaccgcttctactggcgcgtgagttcccggagtgagttgaaccaggtggaccaagtgggctacgtgacctatgacatcctgcagtgccctgaggactagggctcccgtcctgctttgcagtgccatgtaaatccccactgggaccaaccctggggaaggagccagtttgccggatacaaactggtattctgttctggaggaaagggaggagtggaggtgggctgggccctctcttctcacctttgttttttgttggagtgtttctaataaacttggattctctaaccttt

SEQ ID NO: 21 - DNA, 921 bp, Homo sapiens
ccctcggacggccccggaggatgctgctgagccccggcactgcctggctgcgagcacatgatggcgatacgggagctcaaagtgtgccttctcggggacactggggttgggaaatcaagcatcgtgtgtcgatttgtccaggatcactttgaccacaacatcagccctactattggggcatcttttatgaccaaaactgtgccttgtggaaatgaacttcacaagttcctcatctgggacactgctggtcaggaacggtttcattcattggctcccatgtactatcgaggctcagctgcagctgttatcgtgtatgatattaccaagcaggattcattttataccttgaagaaatgggtcaaggagctgaaagaacatggtccagaaaacattgtaatggccatcgctggaaacaagtgcgacctctcagatattagggaggttcccctgaaggatgctaaggaatacgctgaatccataggtgccatcgtggttgagacaagtgcaaaaaatgctattaatatcgaagagctctttcaaggaatcagccgccagatcccacccttggacccccatgaaaatggaaacaatggaacaatcaaagttgagaagccaaccatgcaagccagccgccggtgctgttgacccaagggcgtggtccacggtacttgaagaagccagagcccacatcctgtgcactgctgaaggaccctacgctcggtggcctggcacctcactttgagaagagtgagcacactggctttgcatcctggaaggcctgcagggggcggggcaggaaatgtacctgaaaaggattttagaaaaccctgggaaacccaccacaccaccacaaaatggcctttagtgtatgaaatgcacatggaggggatgtagttgcatttttgctaaaaaaaaaaaaaa

SEQ ID NO: 22 - DNA, 345 bp, Homo sapiens
atgtcggccctcagcctcctcattctgggcctgctcacggcagtgccacctgccagctgtcagcaaggcctggggaaccttcagccctggatgcagggccttatcgcggtggccgtgttcctggtcctcgttgcaatcgcctttgcagtcaaccacttctggtgccaggaggagccggagcctgcacacatgatcctgaccgtcggaaacaaggcagatggagtcctggtgggaacagatggaaggtactcttcgatggcggccagtttcaggtccagtgagcatgagaatgcctatgagaatgtgcccgaggaggaaggcaaggtccgcagcaccccgatgtaa

SEQ ID NO: 23 - DNA, 1499 bp, Homo sapiens
tatttacttcctgcgggtgcacaggctgtggtcgtctatctccctgttgttcttcccatcggcgaagatggccctggagacggtgccgaaggacctgcggcatctgcgggcctgtttgctgtgttcgctggtcaagactatagaccagtttgaatatgatggttgtgacaattgtgatgcatatctacaaatgaagggtaaccgagagatggtatatgactgcactagctcttcctttgatggaatcattgcgatgatgagtccagaggacagctgggtctccaagtggcagcgagtcagtaactttaagccaggtgtatatgcggtgtcagtcactggtcgcctgccccaaggaatcgtgcgggagctgaaaagtcgaggagtggcctacaaatccagagacacagctataaagacctagcaagatgcaaggctgccagcatctttgctctccacctcctgcctctgcttatttcttgttctggaactaaatgaacagaacttcaaatacttcctaccctccaattcagactcagctgactgttgagagagcagcacatcattttatcattttatcttctttggactacaggtggggtgggagggatttgggttggtggattaacagatggaattgaggagagagtaggatgctgattttcctacccgtggcccaggtctgtgccttccccatgccaaggactctaggtcaaatgtcaataaatatgaacctcgagaaagttctgaaggccatgacacctgccttgcctccctcttccattctcttaggcacagtaatagcttatttgccctataagaaccttcccagagcagcagaggcccttctactccctcttgactgtctcagcctctgggattgcagcctttgtagtgtgcttccttgcttcctatcagagggtgctgatccagaggctcagtaaccccatcaacttggtggccctggtgtctcacacttgtatccttctgccctcgagacctggcacagcagtatcccttgaagaaatcctgaggctttgtagagtgctccttgaccatgtttaataattcttccctcccctgcttgtctattttcttctcttcacggctcttcctataccttaggccagtctcaagcactcactggagacccttgggccttgggcgaccattgagtcctagtctcccttgtttgtgcccctgtaggaggtaggtccttttctcctccggcctagtaggggaccttgggtaacatcccatttttcggccaaggtgagttgttttaggataaaaaaatttaccacaaattctcatttaaatttccacagaaatcctgttcgtatccccattttgatttccctaagttccttgttctccctctaaaaagagaatgattgcaccctgcctgtttacctcaggattgttgtgattgtagaaacgaagctatgtgaaaattatataagtattataaaggtgaaatacttttgctctcaaaaaaaaaa

SEQ ID NO: 24 - DNA, 946 bp, Homo sapiens
ggaaacccaagaggaaatgactgagcccgtctgggtccccgcccgctcgcgctcccctggccacaccctccgcctggacgcagcagccaccgccgcgtccctctctccacgaggctgccggcttaggacccccagctccgacatgtcgccctctggtcgcctgtgtcttctcaccatcgttggcctgattctccccaccagaggacagacgttgaaagataccacgtccagttcttcagcagactcaactatcatggacattcaggtcccgacacgagccccagatgcagtctacacagaactccagcccacctctccaaccccaacctggcctgctgatgaaacaccacaaccccagacccagacccagcaactggaaggaacggatgggcctctagtgacagatccagagacacacaagagcaccaaagcagctcatcccactgatgacaccacgacgctctctgagagaccatccccaagcacagacgtccagacagacccccagaccctcaagccatctggttttcatgaggatgaccccttcttctatgatgaacacaccctccggaaacgggggctgttggtcgcagctgtgctgttcatcacaggcatcatcatcctcaccagtggcaagtgcaggcagctgtcccggttatgccggaatcgttgcaggtgagtccatcagaaacaggagctgacaacctgctgggcacccgaagaccaagccccctgccagctcaccgtgcccagcctcctgcatcccctcgaagagcctggccagagagggaagacacagatgatgaagctggagccagggctgccggtccgagtctcctacctcccccaaccctgcccgcccctgaaggctacctggcgccttgggggctgtccctcaagttatctcctctgctaagacaaaaagtaaagcactgtggtctttgcc

SEQ ID NO: 25 - DNA, 11185 bp, Homo sapiens
gctgccccgagcctttctggggaagaactccaggcgtgcggacgcaacagccgagaacattaggtgttgtggacaggagctgggaccaagatcttcggccagccccgcatcctcccgcatcttccagcaccgtcccgcaccctccgcatccttccccgggccaccacgcttcctatgtgacccgcctgggcaacgccgaacccagtcgcgcagcgctgcagtgaattttccccccaaactgcaataagccgccttccaaggccaagatgttcataaatataaagagcatcttatggatgtgttcaaccttaatagtaacccatgcgctacataaagtcaaagtgggaaaaagcccaccggtgaggggctccctctctggaaaagtcagcctaccttgtcatttttcaacgatgcctactttgccacccagttacaacaccagtgaatttctccgcatcaaatggtctaagattgaagtggacaaaaatggaaaagatttgaaagagactactgtccttgtggcccaaaatggaaatatcaagattggtcaggactacaaagggagagtgtctgtgcccacacatcccgaggctgtgggcgatgcctccctcactgtggtcaagctgctggcaagtgatgcgggtctttaccgctgtgacgtcatgtacgggattgaagacacacaagacacggtgtcactgactgtggatggggttgtgtttcactacagggcggcaaccagcaggtacacactgaattttgaggctgctcagaaggcttgtttggacgttggggcagtcatagcaactccagagcagctctttgctgcctatgaagatggatttgagcagtgtgacgcaggctggctggctgatcagactgtcagatatcccatccgggctcccagagtaggctgttatggagataagatgggaaaggcaggagtcaggacttatggattccgttctccccaggaaacttacgatgtgtattgttatgtggatcatctggatggtgatgtgttccacctcactgtccccagtaaattcaccttcgaggaggctgcaaaagagtgtgaaaaccaggatgccaggctggcaacagtgggggaactccaggcggcatggaggaacggctttgaccagtgcgattacgggtggctgtcggatgccagcgtgcgccaccctgtgactgtggccagggcccagtgtggaggtggtctacttggggtgagaaccctgtatcgttttgagaaccagacaggcttccctccccctgatagcagatttgatgcctactgctttaaacctaaagaggctacaaccatcgatttgagtatcctcgcagaaactgcatcacccagtttatccaaagaaccacaaatggtttctgatagaactacaccaatcatccctttagttgatgaattacctgtcattccaacagagttccctcccgtgggaaatattgtcagttttgaacagaaagccacagtccaacctcaggctatcacagatagtttagccaccaaattacccacacctactggcagtaccaagaagccctgggatatggatgactactcaccttctgcttcaggacctcttggaaagctagacatatcagaaattaaggaagaagtgctccagagtacaactggcgtctctcattatgctacggattcatgggatggtgtcgtggaagataaacaaacacaagaatcggttacacagattgaacaaatagaagtgggtcctttggtaacatctatggaaatcttaaagcacattccttccaaggaattccctgtaactgaaacaccattggtaactgcaagaatgatcctggaatccaaaactgaaaagaaaatggtaagcactgtttctgaattggtaaccacaggtcactatggattcaccttgggagaagaggatgatgaagacagaacacttacagttggatctgatgagagcaccttgatctttgaccaaattcctgaagtcattacggtgtcaaagacttcagaagacaccatccacactcatttagaagacttggagtcagtctcagcatccacaactgtttcccctttaattatgcctgataataatggatcatccatggatgactgggaagagagacaaactagtggtaggataacggaagagtttcttggcaaatatctgtctactacaccttttccatcacagcatcgtacagaaatagaattgtttccttattctggtgataaaatattagtagagggaatttccacagttatttatccttctctacaaacagaaatgacacatagaagagaaagaacagaaacactaataccagagatgagaacagatacttatacagatgaaatacaagaagagatcactaaaagtccatttatgggaaaaacagaagaagaagtcttctctgggatgaaactctctacatctctctcagagccaattcatgttacagagtcttctgtggaaatgaccaagtcttttgatttcccaacattgataacaaagttaagtgcagagccaacagaagtaagagatatggaggaagactttacagcaactccaggtactacaaaatatgatgaaaatattacaacagtgcttttggcccatggtactttaagtgttgaagcagccactgtatcaaaatggtcatgggatgaagataatacaacatccaagcctttagagtctacagaaccttcagcctcttcaaaattgccccctgccttactcacaactgtggggatgaatggaaaggataaagacatcccaagtttcactgaagatggagcagatgaatttactcttattccagatagtactcaaaagcagttagaggaggttactgatgaagacatagcagcccatggaaaattcacaattagatttcagccaactacatcaactggtattgcagaaaagtcaactttgagagattctacaactgaagaaaaagttccacctatcacaagcactgaaggccaagtttatgcaaccatggaaggaagtgctttgggtgaagtagaagatgtggacctctctaagccagtatctactgttccccaatttgcacacacttcagaggtggaaggattagcatttgttagttatagtagcacccaagagcctactacttatgtagactcttcccataccattcctctttctgtaattcccaagacagactggggagtgttagtaccttctgttccatcagaagatgaagttctaggtgaaccctctcaagacatacttgtcattgatcagactcgccttgaagcgactatttctccagaaactatgagaacaacaaaaatcacagagggaacaactcaggaagaattcccttggaaagaacagactgcagagaaaccagttcctgctctcagttctacagcttggactcccaaggaggcagtaacaccactggatgaacaagagggcgatggatcagcatatacagtctctgaagatgaattgttgacaggttctgagagggtcccagttttagaaacaactccagttggaaaaattgatcacagtgtgtcttatccaccaggtgctgtaactgagcacaaagtgaaaacagatgaagtggtaacactaacaccacgcattgggccaaaagtatctttaagtccagggcctgaacaaaaatatgaaacagaaggtagtagtacaacaggatttacatcatctttgagtccttttagtacccacattacccagcttatggaagaaaccactactgagaaaacatccctagaggatattgatttaggctcaggattatttgaaaagcccaaagccacagaactcatagaattttcaacaatcaaagtcacagttccaagtgatattaccactgccttcagttcagtagacagacttcacacaacttcagcattcaagccatcttccgcgatcactaagaaaccacctctcatcgacagggaacctggtgaagaaacaaccagtgacatggtaatcattggagaatcaacatctcatgttcctcccactacccttgaagatattgtagccaaggaaacagaaaccgatattgatagagagtatttcacgacttcaagtcctcctgctacacagccaacaagaccacccactgtggaagacaaagaggcctttggacctcaggcgctttctacgccacagcccccagcaagcacaaaatttcaccctgacattaatgtttatattattgaggtcagagaaaataagacaggtcgaatgagtgatttgagtgtaattggtcatccaatagattcagaatctaaagaagatgaaccttgtagtgaagaaacagatccagtgcatgatctaatggctgaaattttacctgaattccctgacataattgaaatagacctataccacagtgaagaaaatgaagaagaagaagaagagtgtgcaaatgctactgatgtgacaaccaccccatctgtgcagtacataaatgggaagcatctcgttaccactgtgcccaaggacccagaagctgcagaagctaggcgtggccagtttgaaagtgttgcaccttctcagaatttctcggacagctctgaaagtgatactcatccatttgtaatagccaaaacggaattgtctactgctgtgcaacctaatgaatctacagaaacaactgagtctcttgaagttacatggaagcctgagacttaccctgaaacatcagaacatttttcaggtggtgagcctgatgttttccccacagtcccattccatgaggaatttgaaagtggaacagccaaaaaaggggcagaatcagtcacagagagagatactgaagttggtcatcaggcacatgaacatactgaacctgtatctctgtttcctgaagagtcttcaggagagattgccattgaccaagaatctcagaaaatagcctttgcaagggctacagaagtaacatttggtgaagaggtagaaaaaagtacttctgtcacatacactcccactatagttccaagttctgcatcagcatatgtttcagaggaagaagcagttaccctaataggaaatccttggccagatgacctgttgtctaccaaagaaagctgggtagaagcaactcctagacaagttgtagagctctcagggagttcttcgattccaattacagaaggctctggagaagcagaagaagatgaagatacaatgttcaccatggtaactgatttatcacagagaaatactactgatacactcattactttagacactagcaggataatcacagaaagcttttttgaggttcctgcaaccaccatttatccagtttctgaacaaccttctgcaaaagtggtgcctaccaagtttgtaagtgaaacagacacttctgagtggatttccagtaccactgttgaggaaaagaaaaggaaggaggaggagggaactacaggtacggcttctacatttgaggtatattcatctacacagagatcggatcaattaattttaccctttgaattagaaagtccaaatgtagctacatctagtgattcaggtaccaggaaaagttttatgtccttgacaacaccaacacagtctgaaagggaaatgacagattctactcctgtctttacagaaacaaatacattagaaaatttgggggcacagaccactgagcacagcagtatccatcaacctggggttcaggaagggctgaccactctcccacgtagtcctgcctctgtctttatggagcagggctctggagaagctgctgccgacccagaaaccaccactgtttcttcattttcattaaacgtagagtatgcaattcaagccgaaaaggaagtagctggcactttgtctccgcatgtggaaactacattctccactgagccaacaggactggttttgagtacagtaatggacagagtagttgctgaaaatataacccaaacatccagggaaatagtgatttcagagcgattaggagaaccaaattatggggcagaaataaggggcttttccacaggttttcctttggaggaagatttcagtggtgactttagagaatactcaacagtgtctcatcccatagcaaaagaagaaacggtaatgatggaaggctctggagatgcagcatttagggacacccagacttcaccatctacagtacctacttcagttcacatcagtcacatatctgactcagaaggacccagtagcaccatggtcagcacttcagccttcccctgggaagagtttacatcctcagctgagggctcaggtgagcaactggtcacagtcagcagctctgttgttccagtgcttcccagtgctgtgcaaaagttttctggtacagcttcctccattatcgacgaaggattgggagaagtgggtactgtcaatgaaattgatagaagatccaccattttaccaacagcagaagtggaaggtacgaaagctccagtagagaaggaggaagtaaaggtcagtggcacagtttcaacaaactttccccaaactatagagccagccaaattatggtctaggcaagaagtcaaccctgtaagacaagaaattgaaagtgaaacaacatcagaggaacaaattcaagaagaaaagtcatttgaatcccctcaaaactctcctgcaacagaacaaacaatctttgattcacagacatttactgaaactgaactcaaaaccacagattattctgtactaacaacaaagaaaacttacagtgatgataaagaaatgaaggaggaagacacttctttagttaacatgtctactccagatccagatgcaaatggcttggaatcttacacaactctccctgaagctactgaaaagtcacattttttcttagctactgcattagtaactgaatctataccagctgaacatgtagtcacagattcaccaatcaaaaaggaagaaagtacaaaacattttccgaaaggcatgagaccaacaattcaagagtcagatactgagctcttattctctggactgggatcaggagaagaagttttacctactctaccaacagagtcagtgaattttactgaagtggaacaaatcaataacacattatatccccacacttctcaagtggaaagtacctcaagtgacaaaattgaagactttaacagaatggaaaatgtggcaaaagaagttggaccactcgtatctcaaacagacatctttgaaggtagtgggtcagtaaccagcacaacattaatagaaattttaagtgacactggagcagaaggacccacggtggcacctctccctttctccacggacatcggacatcctcaaaatcagactgtcaggtgggcagaagaaatccagactagtagaccacaaaccataactgaacaagactctaacaagaattcttcaacagcagaaattaacgaaacaacaacctcatctactgattttctggctagagcttatggttttgaaatggccaaagaatttgttacatcagcaccaaaaccatctgacttgtattatgaaccttctggagaaggatctggagaagtggatattgttgattcatttcacacttctgcaactactcaggcaaccagacaagaaagcagcaccacatttgtttctgatgggtccctggaaaaacatcctgaggtgccaagcgctaaagctgttactgctgatggattcccaacagtttcagtgatgctgcctcttcattcagagcagaacaaaagctcccctgatccaactagcacactgtcaaatacagtgtcatatgagaggtccacagacggtagtttccaagaccgtttcagggaattcgaggattccaccttaaaacctaacagaaaaaaacccactgaaaatattatcatagacctggacaaagaggacaaggatttaatattgacaattacagagagtaccatccttgaaattctacctgagctgacatcggataaaaatactatcatagatattgatcatactaaacctgtgtatgaagacattcttggaatgcaaacagatatagatacagaggtaccatcagaaccacatgacagtaatgatgaaagtaatgatgacagcactcaagttcaagagatctatgaggcagctgtcaacctttctttaactgaggaaacatttgagggctctgctgatgttctggctagctacactcaggcaacacatgatgaatcaatgacttatgaagatagaagccaactagatcacatgggctttcacttcacaactgggatccctgctcctagcacagaaacagaattagacgttttacttcccacggcaacatccctgccaattcctcgtaagtctgccacagttattccagagattgaaggaataaaagctgaagcaaaagccctggatgacatgtttgaatcaagcactttgtctgatggtcaagctattgcagaccaaagtgaaataataccaacattgggccaatttgaaaggactcaggaggagtatgaagacaaaaaacatgctggtccttcttttcagccagaattctcttcaggagctgaggaggcattagtagaccatactccctatctaagtattgctactacccaccttatggatcagagtgtaacagaggtgcctgatgtgatggaaggatccaatcccccatattacactgatacaacattagcagtttcaacatttgcgaagttgtcttctcagacaccatcatctcccctcactatctactcaggcagtgaagcctctggacacacagagatcccccagcccagtgctctgccaggaatagacgtcggctcatctgtaatgtccccacaggattcttttaaggaaattcatgtaaatattgaagcaactttcaaaccatcaagtgaggaataccttcacataactgagcctccctctttatctcctgacacaaaattagaaccttcagaagatgatggtaaacctgagttattagaagaaatggaagcttctcccacagaacttattgctgtggaaggaactgagattctccaagatttccaaaacaaaaccgatggtcaagtttctggagaagcaatcaagatgtttcccaccattaaaacacctgaggctggaactgttattacaactgccgatgaaattgaattagaaggtgctacacagtggccacactctacttctgcttctgccacctatggggtcgaggcaggtgtggtgccttggctaagtccacagacttctgagaggcccacgctttcttcttctccagaaataaaccctgaaactcaagcagctttaatcagagggcaggattccacgatagcagcatcagaacagcaagtggcagcgagaattcttgattccaatgatcaggcaacagtaaaccctgtggaatttaatactgaggttgcaacaccaccattttcccttctggagacttctaatgaaacagatttcctgattggcattaatgaagagtcagtggaaggcacggcaatctatttaccaggacctgatcgctgcaaaatgaacccgtgccttaacggaggcacctgttatcctactgaaacttcctacgtatgcacctgtgtgccaggatacagcggagaccagtgtgaacttgattttgatgaatgtcactctaatccctgtcgtaatggagccacttgtgttgatggttttaacacattcaggtgcctctgccttccaagttatgttggtgcactttgtgagcaagataccgagacatgtgactatggctggcacaaattccaagggcagtgctacaaatactttgcccatcgacgcacatgggatgcagctgaacgggaatgccgtctgcagggtgcccatctcacaagcatcctgtctcacgaagaacaaatgtttgttaatcgtgtgggccatgattatcagtggataggcctcaatgacaagatgtttgagcatgacttccgttggactgatggcagcacactgcaatacgagaattggagacccaaccagccagacagcttcttttctgctggagaagactgtgttgtaatcatttggcatgagaatggccagtggaatgatgttccctgcaattaccatctcacctatacgtgcaagaaaggaacagttgcttgcggccagccccctgttgtagaaaatgccaagacctttggaaagatgaaacctcgttatgaaatcaactccctgattagataccactgcaaagatggtttcattcaacgtcaccttccaactatccggtgcttaggaaatggaagatgggctatacctaaaattacctgcatgaacccatctgcataccaaaggacttattctatgaaatactttaaaaattcctcatcagcaaaggacaattcaataaatacatccaaacatgatcatcgttggagccggaggtggcaggagtcgaggcgctgatccctaaaatggcgaacatgtgttttcatcatttcagccaaagtcctaacttcctgtgcctttcctatcacctcgagaagtaattatcagttggtttggatttttggaccaccgttcagtcattttgggttgccgtgctcccaaaacattttaaatgaaagtattggcattcaaaaagacagcagacaaaatgaaagaaaatgagagcagaaagtaagcatttccagcctatctaatttctttagttttctatttgcctccagtgcagtccatttcctaatgtataccagcctactgtactatttaaaatgctcaatttcagcaccgatggccatgtaaataagatgatttaatgttgattttaatcctgtatataaaataaaaagtcacaatgagtttgggcatatttaatgatgattatggagccttagaggtctttaatcattggttcggctgcttttatgtagtttaggctggaaatggtttcacttgctctttgactgtcagcaagactgaagatggcttttcctggacagctagaaaacacaaaatcttgtaggtcattgcacctatctcagccataggtgcagtttgcttctacatgatgctaaaggctgcgaatgggatcctgatggaactaaggactccaatgtcgaactcttctttgctgcattcctttttcttcacttacaagaaaggcctgaatggaggacttttctgtaaccagg

SEQ ID NO: 26 - DNA, 2245 bp, Homo sapiens
gaatctcgacccttgaatggagttacacgaacggccagatgaaagaaggaaggcccggacctccactcagggccgactaggggactggcggagggtgcacgctgatggatttactcaccgggtgcttggagctccagcagctggctggagcccgcgatgacgtcacggactcgggtcacatggccgagtccgccccgccccctccccgtccccgccgctgcagccgtcgccttcggagcgaagggtaccgacccggcagaagctcggagctctcggggtatcgaggaggcaggcccgcgggcgcacgggcgagcgggccgggagccggagcggcggaggagccggcagcagcggcgcggcgggctccaggcgaggcggtcgacgctcctgaaaacttgcgcgcgcgctcgcgccactgcgcccggagcgatgaagatggtcgcgccctggacgcggttctactccaacagctgctgcttgtgctgccatgtccgcaccggcaccatcctgctcggcgtctggtatctgatcatcaatgctgtggtactgttgattttattgagtgccctggctgatccggatcagtataacttttcaagttctgaactgggaggtgactttgagttcatggatgatgccaacatgtgcattgccattgcgatttctcttctcatgatcctgatatgtgctatggctacttacggagcgtacaagcaacgcgcagcctggatcatcccattcttctgttaccagatctttgactttgccctgaacatgttggttgcaatcactgtgcttatttatccaaactccattcaggaatacatacggcaactgcctcctaattttccctacagagatgatgtcatgtcagtgaatcctacctgtttggtccttattattcttctgtttattagcattatcttgacttttaagggttacttgattagctgtgtttggaactgctaccgatacatcaatggtaggaactcctctgatgtcctggtttatgttaccagcaatgacactacggtgctgctacccccgtatgatgatgccactgtgaatggtgctgccaaggagccaccgccaccttacgtgtctgcctaagccttcaagtgggcggagctgagggcagcagcttgactttgcagacatctgagcaatagttctgttatttcacttttgccatgagcctctctgagcttgtttgttgctgaaatgctactttttaaaatttagatgttagattgaaaactgtagttttcaacatatgctttgctggaacactgtgatagattaactgtagaattcttcctgtacgattggggatataatgggcttcactaaccttccctaggcattgaaacttcccccaaatctgatggacctagaagtctgcttttgtacctgctgggccccaaagttgggcatttttctctctgttccctctcttttgaaaatgtaaaataaaaccaaaaatagacaactttttcttcagccattccagcatagagaacaaaaccttatggaaacaggaatgtcaattgtgtaatcattgttctaattaggtaaatagaagtccttatgtatgtgttacaagaatttcccccacaacatcctttatgactgaagttcaatgacagtttgtgtttggtggtaaaggattttctccatggcctgaattaagaccattagaaagcaccaggccgtgggagcagtgaccatctgctgactgttcttgtggatcttgtgtccagggacatggggtgacatgcctcgtatgtgttagagggtggaatggatgtgtttggcgctgcatgggatctggtgcccctcttctcctggattcacatccccacccagggcccgcttttactaagtgttctgccctagattggttcaaggaggtcatccaactgactttatcgagtggaattgggatatatttgatatacttctgcctaacaacatggaaaagggttttcttttccctgcaagctacatcctactgctttgaacttccaagtatgtctagtcaccttttaaaatgtaaacattttcagaaaaatgaggattgccttccttgtatgcgctttttaccttgactacctgaattgcaagggatttttatatattcatatgttacaaagtcagcaactctcctgttggttcattattgaatgtgctgtaaattaagttgtttgcaattaaaacaaggtttgcccacaaaaaaaaaaaaaaa

SEQ ID NO: 27 - DNA, 4912 bp, Homo sapiens
attggggtctgctctaagctgcagcaagagaaactgtgtgtgaggggaagaggcctgtttcgctgtcgggtctctagttcttgcacgctctttaagagtctgcactggaggaactcctgccattaccagctcccttcttgcagaagggagggggaaacatacatttattcatgccagtctgttgcatgcaggctttttggcttcctaccttgcaacaaaataattgcaccaactccttagtgccgattccgcccacagagagtcctggagccacagtcttttttgctttgcattgtaggagagggactaagtgctagagactatgtcgctttcctgagctaccgagagcgctcgtgaactggaatcaactgcttcagggaaaaagaaaaaaaaaaaaaaaagacttgcctgggaggccgcgagaaacttgcattggaagcttcagcaaccagcattcgagaaactcctctctactttagcacggtctccagactcagccgagagacagcaaactgcagcgcggtgagagagcgagagagagggagagagagactctccagcctgggaactataactcctctgcgagaggcggagaactccttccccaaatcttttggggacttttctctctttacccacctccgcccctgcgaggagttgaggggccagttcggccgccgcgcgcgtcttcccgttcggcgtgtgcttggcccggggaaccgggagggcccggcgatcgcgcggcggccgccgcgagggtgtgagcgcgcgtgggcgcccgccgagccgaggccatggtgcagcaaaccaacaatgccgagaacacggaagcgctgctggccggcgagagctcggactcgggcgccggcctcgagctgggaatcgcctcctcccccacgcccggctccaccgcctccacgggcggcaaggccgacgacccgagctggtgcaagaccccgagtgggcacatcaagcgacccatgaacgccttcatggtgtggtcgcagatcgagcggcgcaagatcatggagcagtcgcccgacatgcacaacgccgagatctccaagcggctgggcaaacgctggaagctgctcaaagacagcgacaagatccctttcattcgagaggcggagcggctgcgcctcaagcacatggctgactaccccgactacaagtaccggcccaggaagaaggtgaagtccggcaacgccaactccagctcctcggccgccgcctcctccaagccgggggagaagggagacaaggtcggtggcagtggcgggggcggccatgggggcggcggcggcggcgggagcagcaacgcggggggaggaggcggcggtgcgagtggcggcggcgccaactccaaaccggcgcagaaaaagagctgcggctccaaagtggcgggcggcgcgggcggtggggttagcaaaccgcacgccaagctcatcctggcaggcggcggcggcggcgggaaagcagcggctgccgccgccgcctccttcgccgccgaacaggcgggggccgccgccctgctgcccctgggcgccgccgccgaccaccactcgctgtacaaggcgcggactcccagcgcctcggcctccgcctcctcggcagcctcggcctccgcagcgctcgcggccccgggcaagcacctggcggagaagaaggtgaagcgcgtctacctgttcggcggcctgggcacgtcgtcgtcgcccgtgggcggcgtgggcgcgggagccgaccccagcgaccccctgggcctgtacgaggaggagggcgcgggctgctcgcccgacgcgcccagcctgagcggccgcagcagcgccgcctcgtcccccgccgccggccgctcgcccgccgaccaccgcggctacgccagcctgcgcgccgcctcgcccgccccgtccagcgcgccctcgcacgcgtcctcctcggcctcgtcccactcctcctcttcctcctcctcgggctcctcgtcctccgacgacgagttcgaagacgacctgctcgacctgaaccccagctcaaactttgagagcatgtccctgggcagcttcagttcgtcgtcggcgctcgaccgggacctggattttaacttcgagcccggctccggctcgcacttcgagttcccggactactgcacgcccgaggtgagcgagatgatctcgggagactggctcgagtccagcatctccaacctggttttcacctactgaagggcgcgcaggcagggagaagggccggggggggtaggagaggagaaaaaaaaagtgaaaaaaagaaacgaaaaggacagacgaagagtttaaagagaaaagggaaaaaagaaagaaaaagtaagcagggctggcttcgcccgcgttctcgtcgtcggatcaaggagcgcggcggcgttttggacccgcgctcccatcccccaccttcccgggccggggacccactctgcccagccggagggacgcggaggaggaagagggtagacaggggcgacctgtgattgttgttattgatgttgttgttgatggcaaaaaaaaaaaagcgacttcgagtttgctcccctttgcttgaagagaccccctcccccttccaacgagcttccggacttgtctgcacccccagcaagaaggcgagttagttttctagagacttgaaggagtctcccccttcctgcatcaccaccttggttttgttttattttgcttcttggtcaagaaaggaggggagaacccagcgcacccctccccccctttttttaaacgcgtgatgaagacagaaggctccggggtgacgaatttggccgatggcagatgttttgggggaacgccgggactgagagactccacgcaggcgaattcccgtttggggcttttttttcctccctcttttccccttgccccctctgcagccggaggaggagatgttgaggggaggaggccagccagtgtgaccggcgctaggaaatgacccgagaaccccgttggaagcgcagcagcgggagctaggggcgggggcggaggaggacacgaactggaagggggttcacggtcaaactgaaatggatttgcacgttggggagctggcggcggcggctgctgggcctccgccttcttttctacgtgaaatcagtgaggtgagacttcccagaccccggaggcgtggaggagaggagactgtttgatgtggtacaggggcagtcagtggagggcgagtggtttcggaaaaaaaaaaagaaaaaaagaaaaaaaaagaaaaaaaaaagatttttttcttctcttaatcggaatcgtgatggtgttggattatttcaatggtggggttaatatagcatgttatcctgtctatcttttaaagatttctgtataagactgttgagcagtttttaaaatagtgtaggataatataaaaagcagatagatggcgctatgtttgattcctacaacgaaattatcaccagctttttttcattcttaactctttaaaggattcaaacgcaactcaaatctgtgctggactttaaaaaaacaattcaggaccaaattttttctcagtgtgtgtgtttattccttataggtgtaaatgagaagacgtgtttttttccttcaccgatgctccatcctcgtatttctttttccttgtaaatgtaatcagatgccattttatatgtggacgtatttatactggccaaacatattttttcttttgtccctttttttctttcctttctttttacttcctttatttctttattccttccttttcctttttttcttttttttttctttttttttttttttttttggtagttgttgttacccacgccattttacgtctccttcactgaagggctagagttttaacttttaattttttatatttaaatgtagacttttgacacttttaaaaaacaaaaaaagacaagagagatgaaaacgtttgattattttctcagtgtatttttgtaaaaaatatataaagggggtgttaatcggtgtaaatcgctgtttggatttcctgattttataacagggcggctggttaatatctcacacagtttaaaaaatcagcccctaatttctccatgtttacacttcaatctgcaggcttcttaaagtgacagtatcccttaacctgccaccagtgtccaccctccggcccccgtcttgtaaaaaggggaggagaattagccaaacactgtaagcttttaagaaaaacaaagttttaaacgaaatactgctctgtccagaggctttaaaactggtgcaattacagcaaaaagggattctgtagctttaacttgtaaaccacatcttttttgcactttttttataagcaaaaacgtgccgtttaaaccactggatctatctaaatgccgatttgagttcgcgacactatgtactgcgtttttcattcttgtatttgactatttaatcctttctacttgtcgctaaatataattgttttagtcttatggcatgatgatagcatatgtgttcaggtttatagctgttgtgtttaaaaattgaaaaaagtggaaaacatctttgtacatttaagtctgtattataataagcaaaaagattgtgtgtatgtatgtttaatataacatgacaggcactaggacgtctgcctttttaaggcagttccgttaagggtttttgtttttaaacttttttttgccatccatcctgtgcaatatgccgtgtagaatatttgtcttaaaattcaaggccacaaaaacaatgtttgggggaaaaaaaagaaaaaatcatgccagctaatcatgtcaagttcactgcctgtcagattgttgatatataccttctgtaaataactttttttgagaaggaaataaaatcagctggaactgaaccctaaaaaaaaaaaaaaaaaaaaaaaaaaaaaaaaaaaa

SEQ ID NO: 28 - DNA, 2637 bp, Homo sapiens
ggcacgaggcccctgcgtgcggcgcttctcccaggccccaccttccatccagtgccctggaccctcggctgggtagcgccaccagagcgaccaaacgtcccgcgccttccaggccgcactccagagccaaaagagctccatggcggcggcggccaagcccaacaacctttccctggtggtgcacggaccgggggacttgcgcctggagaactatcctatccctgaaccaggcccaaatgaggtcttgctgaggatgcattctgttggaatctgtggctcagatgtccactactgggagtatggtcgaattgggaattttattgtgaaaaagcccatggtgctgggacatgaagcttcgggaacagtcgaaaaagtgggatcatcggtaaagcacctaaaaccaggtgatcgtgttgccatcgagcctggtgctccccgagaaaatgatgaattctgcaagatgggccgatacaatctgtcaccttccatcttcttctgtgccacgccccccgatgacgggaacctctgccggttctataagcacaatgcagccttttgttacaagcttcctgacaatgtcacctttgaggaaggcgccctgatcgagccactttctgtggggatccatgcctgcaggagaggcggagttaccctgggacacaaggtccttgtgtgtggagctgggccaatcgggatggtcactttgctcgtggccaaagcaatgggagcagctcaagtagtggtgactgatctgtctgctacccgattgtccaaagccaaggagattggggctgatttagtcctccagatctccaaggagagccctcaggaaatcgccaggaaagtagaaggtcagctggggtgcaagccggaagtcaccatcgagtgcacgggggcagaggcctccatccaggcgggcatctacgccactcgctctggtgggaccctcgtgcttgtggggctgggctctgagatgaccaccgtacccctactgcatgcagccatccgggaggtggatatcaagggcgtgtttcgatactgcaacacgtggccagtggcgatttcgatgcttgcgtccaagtctgtgaatgtaaaacccctcgtcacccataggtttcctctggagaaagctctggaggcctttgaaacatttaaaaagggattggggttgaaaatcatgctcaagtgtgaccccagtgaccagaatccctgatgttaatgggctctgccctcatccccacagtcttgggatctcagggcacaatggctggacatgggtgggctctgatgcagaactttctcttttgaatgttaagaataactaatacaattcattgtgaacagaagtccttaagcagaggaattggtgtgccttaaagatacaatctgggatagtttgggggaacttgtagccagaatgccctgttcatgctgagcaaagttcagcaagtagagcagagtttggcaggcaggtgccaggaactccccttcttcctggagtgccttcattgaggaaggaaatctggcccttgggtttcctggttccactgctactgacccagaggggaatgagggctgagttatgaaaagataacttcatgaagacttaactggcccagaagctgattttcatgaaaatctgccactcagggtctgggatgaaggcttgtcagcacttccagtttagaacgcaatgtttctagagacatattggctgtttgttttgatgataaaaggagaataagaaaaggcatcactttcctggatccaggataatttttaaaccaatcaaatgaaaaaaacaaacaaacaaaaaaggaaatgtcatgtgaggttaaaccagtttgcattcccctaatgtggaaaaagtaagaggactactcagcactgtttgaagattgcctcttctacagcttctgagaattgtgttatttcacttgccaagtgaaggaccccctccccaacatgccccagcccacccctaagcatggtcccttgtcaccaggcaaccaggaaactgctacttgtggacctcaccagagaccaggagggtttggttagctcacaggacttcccccaccccagaagattagcatcccatactagactcatactcaactcaactaggctcatactcaattgatggttattagacaattccatttctttctggttattataaacagaaaatctttcctcttctcattaccagtaaaggctcttggtatctttctgttggaatgatttctatgaacttgtcttattttaatggtgggttttttttctggtaagatttagacctaaatcgcatcatgccaacttgtgactttgagactattcatcaagaatgaggatatagtagccatgacatagcttgagctatagcctttaattccttactttggctatgggtggagggtgagtttgaagaggttctgattttcttgtaacctgggaaagccatgaccttgtgcccgattctttcagattgctttgggtaataaatattggtggtggtatctgaaaaaaaaaaaaaaaaaaaaaaaaaaaaaaaaaaaaaaaaaaaaaaaaaaaaaaaaaaaaaaaaaaaaaaaaaaaaaaaaaaaaaaaaaaaaaaaaaaaaaaaaaaaaaaaaaa

SEQ ID NO: 29 - DNA, 1778 bp, Homo sapiens
tagaagtttacaatgaagtttcttctaatactgctcctgcaggccactgcttctggagctcttcccctgaacagctctacaagcctggaaaaaaataatgtgctatttggtgagagatacttagaaaaattttatggccttgagataaacaaacttccagtgacaaaaatgaaatatagtggaaacttaatgaaggaaaaaatccaagaaatgcagcacttcttgggtctgaaagtgaccgggcaactggacacatctaccctggagatgatgcacgcacctcgatgtggagtccccgatctccatcatttcagggaaatgccaggggggcccgtatggaggaaacattatatcacctacagaatcaataattacacacctgacatgaaccgtgaggatgttgactacgcaatccggaaagctttccaagtatggagtaatgttacccccttgaaattcagcaagattaacacaggcatggctgacattttggtggtttttgcccgtggagctcatggagacttccatgcttttgatggcaaaggtggaatcctagcccatgcttttggacctggatctggcattggaggggatgcacatttcgatgaggacgaattctggactacacattcaggaggcacaaacttgttcctcactgctgttcacgagattggccattccttaggtcttggccattctagtgatccaaaggctgtaatgttccccacctacaaatatgtcgacatcaacacatttcgcctctctgctgatgacatacgtggcattcagtccctgtatggagacccaaaagagaaccaacgcttgccaaatcctgacaattcagaaccagctctctgtgaccccaatttgagttttgatgctgtcactaccgtgggaaataagatctttttcttcaaagacaggttcttctggctgaaggtttctgagagaccaaagaccagtgttaatttaatttcttccttatggccaaccttgccatctggcattgaagctgcttatgaaattgaagccagaaatcaagtttttctttttaaagatgacaaatactggttaattagcaatttaagaccagagccaaattatcccaagagcatacattcttttggttttcctaactttgtgaaaaaaattgatgcagctgtttttaacccacgtttttataggacctacttctttgtagataaccagtattggaggtatgatgaaaggagacagatgatggaccctggttatcccaaactgattaccaagaacttccaaggaatcgggcctaaaattgatgcagtcttctattctaaaaacaaatactactatttcttccaaggatctaaccaatttgaatatgacttcctactccaacgtatcaccaaaacactgaaaagcaatagctggtttggttgttagaaatggtgtaattaatggtttttgttagttcacttcagcttaataagtatttattgcatatttgctatgtcctcagtgtaccactacttagagatatgtatcataaaaataaaatctgtaaaccataggtaatgattatataaaatacataatatttttcaattttgaaaactctaattgtccattcttgcttgactctactattaagtttgaaaatagttaccttcaaagcaagataattctatttgaagcatgctctgtaagttgcttcctaacatccttggactgagaaattatacttacttctggcataactaaaattaagtatatatattttggctcaaataaaattg

SEQ ID NO: 30 - DNA, 777 bp, Homo sapiens
ggccccttgtctgcagagatggctcccaatgcttcctgcctctgtgtgcatgtccgttccgaggaatgggatttaatgacctttgatgccaacccatatgacagcgtgaaaaaaatcaaagaacatgtccggtctaagaccaaggttcctgtgcaggaccaggttcttttgctgggctccaagatcttaaagccacggagaagcctctcatcttatggcattgacaaagagaagaccatccaccttaccctgaaagtggtgaagcccagtgatgaggagctgcccttgtttcttgtggagtcaggtgatgaggcaaagaggcacctcctccaggtgcgaaggtccagctcagtggcacaagtgaaagcaatgatcgagactaagacgggtataatccctgagacccagattgtgacttgcaatggaaagagactggaagatgggaagatgatggcagattacggcatcagaaagggcaacttactcttcctggcatcttattgtattggagggtgaccaccctggggatggggtgttggcaggggtcaaaaagcttatttcttttaatctcttactcaacgaacacatcttctgatgatttcccaaaattaatgagaatgagatgagtagagtaagatttgggtgggatgggtaggatgaagtatattgcccaactctatgtttctttgattctaacacaattaattaagtgacatgatttttactaatgtattactgagactagtaaataaatttttaaggcaaaatagagcattc

SEQ ID NO: 31 - DNA, 9645 bp, Homo sapiens
atgcccaagcgcgcgcactggggggccctctccgtggtgctgatcctgctttggggccatccgcgagtggcgctggcctgcccgcatccttgtgcctgctacgtccccagcgaggtccactgcacgttccgatccctggcttccgtgcccgctggcattgctagacacgtggaaagaatcaatttggggtttaatagcatacaggccctgtcagaaacctcatttgcaggactgaccaagttggagctacttatgattcacggcaatgagatcccaagcatccccgatggagctttaagagacctcagctctcttcaggttttcaagttcagctacaacaagctgagagtgatcacaggacagaccctccagggtctctctaacttaatgaggctgcacattgaccacaacaagatcgagtttatccaccctcaagctttcaacggcttaacgtctctgaggctactccatttggaaggaaatctcctccaccagctgcaccccagcaccttctccacgttcacatttttggattatttcagactctccaccataaggcacctctacttagcagagaacatggttagaactcttcctgccagcatgcttcggaacatgccgcttctggagaatctttacttgcagggaaatccgtggacctgcgattgtgagatgagatggtttttggaatgggatgcaaaatccagaggaattctgaagtgtaaaaaggacaaagcttatgaaggcggtcagttgtgtgcaatgtgcttcagtccaaagaagttgtacaaacatgagatacacaagctgaaggacatgacttgtctgaagccttcaatagagtcccctctgagacagaacaggagcaggagtattgaggaggagcaagaacaggaagaggatggtggcagccagctcatcctggagaaattccaactgccccagtggagcatctctttgaatatgaccgacgagcacgggaacatggtgaacttggtctgtgacatcaagaaaccaatggatgtgtacaagattcacttgaaccaaacggatcctccagatattgacataaatgcaacagttgccttggactttgagtgtccaatgacccgagaaaactatgaaaagctatggaaattgatagcatactacagtgaagttcccgtgaagctacacagagagctcatgctcagcaaagaccccagagtcagctaccagtacaggcaggatgctgatgaggaagctctttactacacaggtgtgagagcccagattcttgcagaaccagaatgggtcatgcagccatccatagatatccagctgaaccgacgtcagagtacggccaagaaggtgctactttcctactacacccagtattctcaaacaatatccaccaaagatacaaggcaggctcggggcagaagctgggtaatgattgagcctagtggagctgtgcaaagagatcagactgtcctggaagggggtccatgccagttgagctgcaacgtgaaagcttctgagagtccatctatcttctgggtgcttccagatggctccatcctgaaagcgcccatggatgacccagacagcaagttctccattctcagcagtggctggctgaggatcaagtccatggagccatctgactcaggcttgtaccagtgcattgctcaagtgagggatgaaatggaccgcatggtatatagggtacttgtgcagtctccctccactcagccagccgagaaagacacagtgacaattggcaagaacccaggggagtcggtgacattgccttgcaatgctttagcaatacccgaagcccaccttagctggattcttccaaacagaaggataattaatgatttggctaacacatcacatgtatacatgttgccaaatggaactctttccatcccaaaggtccaagtcagtgatagtggttactacagatgtgtggctgtcaaccagcaaggggcagaccattttacggtgggaatcacagtgaccaagaaagggtctggcttgccatccaaaagaggcagacgcccaggtgcaaaggctctttccagagtcagagaagacatcgtggaggatgaagggggctcgggcatgggagatgaagagaacacttcaaggagacttctgcatccaaaggaccaagaggtgttcctcaaaacaaaggatgatgccatcaatggagacaagaaagccaagaaagggagaagaaagctgaaactctggaagcattcggaaaaagaaccagagaccaatgttgcagaaggtcgcagagtgtttgaatctagacgaaggataaacatggcaaacaaacagattaatccggagcgctgggctgatattttagccaaagtccgtgggaaaaatctccctaagggcacagaagtacccccgttgattaaaaccacaagtcctccatccttgagcctagaagtcacaccaccttttcctgctgtttctcccccctcagcatctcctgtgcagacagtaaccagtgctgaagaatcctcagcagatgtacctctacttggtgaagaagagcacgttttgggtaccatttcctcagccagcatggggctagaacacaaccacaatggagttattcttgttgaacctgaagtaacaagcacacctctggaggaagttgttgatgacctttctgagaagactgaggagataacttccactgaaggagacctgaaggggacagcagcccctacacttatatctgagccttatgaaccatctcctactctgcacacattagacacagtctatgaaaagcccacccatgaagagacggcaacagagggttggtctgcagcagatgttggatcgtcaccagagcccacatccagtgagtatgagcctccattggatgctgtctccttggctgagtctgagcccatgcaatactttgacccagatttggagactaagtcacaaccagatgaggataagatgaaagaagacacctttgcacaccttactccaacccccaccatctgggttaatgactccagtacatcacagttatttgaggattctactataggggaaccaggtgtcccaggccaatcacatctacaaggactgacagacaacatccaccttgtgaaaagtagtctaagcactcaagacaccttactgattaaaaagggtatgaaagagatgtctcagacactacagggaggaaatatgctagagggagaccccacacactccagaagttctgagagtgagggccaagagagcaaatccatcactttgcctgactccacactgggtataatgagcagtatgtctccagttaagaagcctgcggaaaccacagttggtaccctcctagacaaagacaccacaacagtaacaacaacaccaaggcaaaaagttgctccgtcatccaccatgagcactcacccttctcgaaggagacccaacgggagaaggagattacgccccaacaaattccgccaccggcacaagcaaaccccacccacaacttttgccccatcagagactttttctactcaaccaactcaagcacctgacattaagatttcaagtcaagtggagagttctctggttcctacagcttgggtggataacacagttaatacccccaaacagttggaaatggagaagaatgcagaacccacatccaagggaacaccacggagaaaacacgggaagaggccaaacaaacatcgatataccccttctacagtgagctcaagagcgtccggatccaagcccagcccttctccagaaaataaacatagaaacattgttactcccagttcagaaactatacttttgcctagaactgtttctctgaaaactgagggcccttatgattccttagattacatgacaaccaccagaaaaatatattcatcttaccctaaagtccaagagacacttccagtcacatataaacccacatcagatggaaaagaaattaaggatgatgttgccacaaatgttgacaaacataaaagtgacattttagtcactggtgaatcaattactaatgccataccaacttctcgctccttggtctccactatgggagaatttaaggaagaatcctctcctgtaggctttccaggaactccaacctggaatccctcaaggacggcccagcctgggaggctacagacagacatacctgttaccacttctggggaaaatcttacagaccctccccttcttaaagagcttgaggatgtggatttcacttccgagtttttgtcctctttgacagtctccacaccatttcaccaggaagaagctggttcttccacaactctctcaagcataaaagtggaggtggcttcaagtcaggcagaaaccaccacccttgatcaagatcatcttgaaaccactgtggctattctcctttctgaaactagaccacagaatcacacccctactgctgcccggatgaaggagccagcatcctcgtccccatccacaattctcatgtctttgggacaaaccaccaccactaagccagcacttcccagtccaagaatatctcaagcatctagagattccaaggaaaatgttttcttgaattatgtggggaatccagaaacagaagcaaccccagtcaacaatgaaggaacacagcatatgtcagggccaaatgaattatcaacaccctcttccgaccgggatgcatttaacttgtctacaaagctggaattggaaaagcaagtatttggtagtaggagtctaccacgtggcccagatagccaacgccaggatggaagagttcatgcttctcatcaactaaccagagtccctgccaaacccatcctaccaacagcaacagtgaggctacctgaaatgtccacacaaagcgcttccagatactttgtaacttcccagtcacctcgtcactggaccaacaaaccggaaataactacatatccttctggggctttgccagagaacaaacagtttacaactccaagattatcaagtacaacaattcctctcccattgcacatgtccaaacccagcattcctagtaagtttactgaccgaagaactgaccaattcaatggttactccaaagtgtttggaaataacaacatccctgaggcaagaaacccagttggaaagcctcccagtccaagaattcctcattattccaatggaagactccctttctttaccaacaagactctttcttttccacagttgggagtcacccggagaccccagatacccacttctcctgccccagtaatgagagagagaaaagttattccaggttcctacaacaggatacattcccatagcaccttccatctggactttggccctccggcacctccgttgttgcacactccgcagaccacgggatcaccctcaactaacttacagaatatccctatggtctcttccacccagagttctatctcctttataacatcttctgtccagtcctcaggaagcttccaccagagcagctcaaagttctttgcaggaggacctcctgcatccaaattctggtctcttggggaaaagccccaaatcctcaccaagtccccacagactgtgtccgtcaccgctgagacagacactgtgttcccctgtgaggcaacaggaaaaccaaagcctttcgttacttggacaaaggtttccacaggagctcttatgactccgaataccaggatacaacggtttgaggttctcaagaacggtaccttagtgatacggaaggttcaagtacaagatcgaggccagtatatgtgcaccgccagcaacctgcacggcctggacaggatggtggtcttgctttcggtcaccgtgcagcaacctcaaatcctagcctcccactaccaggacgtcactgtctacctgggagacaccattgcaatggagtgtctggccaaagggaccccagccccccaaatttcctggatcttccctgacaggagggtgtggcaaactgtgtcccccgtggagagccgcatcaccctgcacgaaaaccggaccctttccatcaaggaggcgtccttctcagacagaggcgtctataagtgcgtggccagcaatgcagccggggcggacagcctggccatccgcctgcacgtggcggcactgccccccgttatccaccaggagaagctggagaacatctcgctgcccccggggctcagcattcacattcactgcactgccaaggctgcgcccctgcccagcgtgcgctgggtgctcggggacggtacccagatccgcccctcgcagttcctccacgggaacttgtttgttttccccaacgggacgctctacatccgcaacctcgcgcccaaggacagcgggcgctatgagtgcgtggccgccaacctggtaggctccgcgcgcaggacggtgcagctgaacgtgcagcgtgcagcagccaacgcgcgcatcacgggcacctccccgcggaggacggacgtcaggtacggaggaaccctcaagctggactgcagcgcctcgggggacccctggccgcgcatcctctggaggctgccgtccaagaggatgatcgacgcgctcttcagttttgatagcagaatcaaggtgtttgccaatgggaccctggtggtgaaatcagtgacggacaaagatgccggagattacctgtgcgtagctcgaaataaggttggtgatgactacgtggtgctcaaagtggatgtggtgatgaaaccggccaagattgaacacaaggaggagaacgaccacaaagtcttctacgggggtgacctgaaagtggactgtgtggccaccgggcttcccaatcccgagatctcctggagcctcccagacgggagtctggtgaactccttcatgcagtcggatgacagcggtggacgcaccaagcgctatgtcgtcttcaacaatgggacactctactttaacgaagtggggatgagggaggaaggagactacacctgctttgctgaaaatcaggtcgggaaggacgagatgagagtcagagtcaaggtggtgacagcgcccgccaccatccggaacaagacttacttggcggttcaggtgccctatggagacgtggtcactgtagcctgtgaggccaaaggagaacccatgcccaaggtgacttggttgtccccaaccaacaaggtgatccccacctcctctgagaagtatcagatataccaagatggcactctccttattcagaaagcccagcgttctgacagcggcaactacacctgcctggtcaggaacagcgcgggagaggataggaagacggtgtggattcacgtcaacgtccagccacccaagatcaacggtaaccccaaccccatcaccaccgtgcgggagatagcagccgggggcagtcggaaactgattgactgcaaagctgaaggcatccccaccccgagggtgttatgggcttttcccgagggtgtggttctgccagctccatactatggaaaccggatcactgtccatggcaacggttccctggacatcaggagtttgaggaagagcgactccgtccagctggtatgcatggcacgcaacgagggaggggaggcgaggttgatcgtgcagctcactgtcctggagcccatggagaaacccatcttccacgacccgatcagcgagaagatcacggccatggcgggccacaccatcagcctcaactgctctgccgcggggaccccgacacccagcctggtgtgggtccttcccaatggcaccgatctgcagagtggacagcagctgcagcgcttctaccacaaggctgacggcatgctacacattagcggtctctcctcggtggacgctggggcctaccgctgcgtggcccgcaatgccgctggccacacggagaggctggtctccctgaaggtgggactgaagccagaagcaaacaagcagtatcataacctggtcagcatcatcaatggtgagaccctgaagctcccctgcacccctcccggggctgggcagggacgtttctcctggacgctccccaatggcatgcatctggagggcccccaaaccctgggacgcgtttctcttctggacaatggcaccctcacggttcgtgaggcctcggtgtttgacaggggtacctatgtatgcaggatggagacggagtacggcccttcggtcaccagcatccccgtgattgtgatcgcctatcctccccggatcaccagcgagcccaccccggtcatctacacccggcccgggaacaccgtgaaactgaactgcatggctatggggattcccaaagctgacatcacgtgggagttaccggataagtcgcatctgaaggcaggggttcaggctcgtctgtatggaaacagatttcttcacccccagggatcactgaccatccagcatgccacacagagagatgccggcttctacaagtgcatggcaaaaaacattctcggcagtgactccaaaacaacttacatccacgtcttctgaaatgtggattccagaatgattgcttaggaactgacaacaaagcggggtttgtaagggaagccaggttggggaataggagctcttaaataatgtgtcacagtgcatggtggcctctggtgggtttcaagttgaggttgatcttgatctacaattgttgggaaaaggaagcaatgcagacacgagaaggagggctcagccttgctgagacactttcttttgtgtttacatcatgccaggggcttcattcagggtgtctgtgctctgactgcaatttttcttcttttgcaaatgccactcgactgccttcataagcgtccataggatatctgaggaacattcatcaaaaataagccatagacatgaacaacacctcactaccccattgaagacgcatcacctagttaacctgctgcagtttttacatgatagactttgttccagattgacaagtcatctttcagttatttcctctgtcacttcaaaactccagcttgcccaataaggatttagaaccagagtgactgatatatatatatatattttaattcagagttacatacatacagctaccattttatatgaaaaaagaaaaacatttcttcctggaactcactttttatataatgttttatatatatattttttcctttcaaatcagacgatgagactagaaggagaaatactttctgtcttattaaaattaataaattattggtctttacaagacttggatacattacagcagacatggaaatataattttaaaaaatttctctccaacctccttcaaattcagtcaccactgttatattaccttctccaggaaccctccagtggggaaggctgcgatattagatttccttgtatgcaaagtttttgttgaaagctgtgctcagaggaggtgagaggagaggaaggagaaaactgcatcataactttacagaattgaatctagagtcttccccgaaaagcccagaaacttctctgcagtatctggcttgtccatctggtctaaggtggctgcttcttccccagccatgagtcagtttgtgcccatgaataatacacgacctgttatttccatgactgctttactgtatttttaaggtcaatatactgtacatttgataataaaataatattctcccaaaaaaaaaa

SEQ ID NO: 32 - DNA, 5921 bp, Homo sapiens
agcagacgggagtttctcctcggggtcggagcaggaggcacgcggagtgtgaggccacgcatgagcggacgctaaccccctccccagccacaaagagtctacatgtctagggtctagacatgttcagctttgtggacctccggctcctgctcctcttagcggccaccgccctcctgacgcacggccaagaggaaggccaagtcgagggccaagacgaagacatcccaccaatcacctgcgtacagaacggcctcaggtaccatgaccgagacgtgtggaaacccgagccctgccggatctgcgtctgcgacaacggcaaggtgttgtgcgatgacgtgatctgtgacgagaccaagaactgccccggcgccgaagtccccgagggcgagtgctgtcccgtctgccccgacggctcagagtcacccaccgaccaagaaaccaccggcgtcgagggacccaagggagacactggcccccgaggcccaaggggacccgcaggcccccctggccgagatggcatccctggacagcctggacttcccggaccccccggaccccccggacctcccggaccccctggcctcggaggaaactttgctccccagctgtcttatggctatgatgagaaatcaaccggaggaatttccgtgcctggccccatgggtccctctggtcctcgtggtctccctggcccccctggtgcacctggtccccaaggcttccaaggtccccctggtgagcctggcgagcctggagcttcaggtcccatgggtccccgaggtcccccaggtccccctggaaagaatggagatgatggggaagctggaaaacctggtcgtcctggtgagcgtgggcctcctgggcctcagggtgctcgaggattgcccggaacagctggcctccctggaatgaagggacacagaggtttcagtggtttggatggtgccaagggagatgctggtcctgctggtcctaagggtgagcctggcagccctggtgaaaatggagctcctggtcagatgggcccccgtggcctgcctggtgagagaggtcgccctggagcccctggccctgctggtgctcgtggaaatgatggtgctactggtgctgccgggccccctggtcccaccggccccgctggtcctcctggcttccctggtgctgttggtgctaagggtgaagctggtccccaagggccccgaggctctgaaggtccccagggtgtgcgtggtgagcctggcccccctggccctgctggtgctgctggccctgctggaaaccctggtgctgatggacagcctggtgctaaaggtgccaatggtgctcctggtattgctggtgctcctggcttccctggtgcccgaggcccctctggaccccagggccccggcggccctcctggtcccaagggtaacagcggtgaacctggtgctcctggcagcaaaggagacactggtgctaagggagagcctggccctgttggtgttcaaggaccccctggccctgctggagaggaaggaaagcgaggagctcgaggtgaacccggacccactggcctgcccggaccccctggcgagcgtggtggacctggtagccgtggtttccctggcgcagatggtgttgctggtcccaagggtcccgctggtgaacgtggttctcctggccccgctggccccaaaggatctcctggtgaagctggtcgtcccggtgaagctggtctgcctggtgccaagggtctgactggaagccctggcagccctggtcctgatggcaaaactggcccccctggtcccgccggtcaagatggtcgccccggacccccaggcccacctggtgcccgtggtcaggctggtgtgatgggattccctggacctaaaggtgctgctggagagcccggcaaggctggagagcgaggtgttcccggaccccctggcgctgtcggtcctgctggcaaagatggagaggctggagctcagggaccccctggccctgctggtcccgctggcgagagaggtgaacaaggccctgctggctcccccggattccagggtctccctggtcctgctggtcctccaggtgaagcaggcaaacctggtgaacagggtgttcctggagaccttggcgcccctggcccctctggagcaagaggcgagagaggtttccctggcgagcgtggtgtgcaaggtccccctggtcctgctggaccccgaggggccaacggtgctcccggcaacgatggtgctaagggtgatgctggtgcccctggagctcccggtagccagggcgcccctggccttcagggaatgcctggtgaacgtggtgcagctggtcttccagggcctaagggtgacagaggtgatgctggtcccaaaggtgctgatggctctcctggcaaagatggcgtccgtggtctgaccggccccattggtcctcctggccctgctggtgcccctggtgacaagggtgaaagtggtcccagcggccctgctggtcccactggagctcgtggtgcccccggagaccgtggtgagcctggtccccccggccctgctggctttgctggcccccctggtgctgacggccaacctggtgctaaaggcgaacctggtgatgctggtgccaaaggcgatgctggtccccctgggcctgccggacccgctggaccccctggccccattggtaatgttggtgctcctggagccaaaggtgctcgcggcagcgctggtccccctggtgctactggtttccctggtgctgctggccgagtcggtcctcctggcccctctggaaatgctggaccccctggccctcctggtcctgctggcaaagaaggcggcaaaggtccccgtggtgagactggccctgctggacgtcctggtgaagttggtccccctggtccccctggccctgctggcgagaaaggatcccctggtgctgatggtcctgctggtgctcctggtactcccgggcctcaaggtattgctggacagcgtggtgtggtcggcctgcctggtcagagaggagagagaggcttccctggtcttcctggcccctctggtgaacctggcaaacaaggtccctctggagcaagtggtgaacgtggtccccccggtcccatgggcccccctggattggctggaccccctggtgaatctggacgtgagggggctcctgctgccgaaggttcccctggacgagacggttctcctggcgccaagggtgaccgtggtgagaccggccccgctggaccccctggtgctcctggtgctcctggtgcccctggccccgttggccctgctggcaagagtggtgatcgtggtgagactggtcctgctggtcccgccggtcccgtcggccccgtcggcgcccgtggccccgccggaccccaaggcccccgtggtgacaagggtgagacaggcgaacagggcgacagaggcataaagggtcaccgtggcttctctggcctccagggtccccctggccctcctggctctcctggtgaacaaggtccctctggagcctctggtcctgctggtccccgaggtccccctggctctgctggtgctcctggcaaagatggactcaacggtctccctggccccattgggccccctggtcctcgcggtcgcactggtgatgctggtcctgttggtccccccggccctcctggacctcctggtccccctggtcctcccagcgctggtttcgacttcagcttcctgccccagccacctcaagagaaggctcacgatggtggccgctactaccgggctgatgatgccaatgtggttcgtgaccgtgacctcgaggtggacaccaccctcaagagcctgagccagcagatcgagaacatccggagcccagagggaagccgcaagaaccccgcccgcacctgccgtgacctcaagatgtgccactctgactggaagagtggagagtactggattgaccccaaccaaggctgcaacctggatgccatcaaagtcttctgcaacatggagactggtgagacctgcgtgtaccccactcagcccagtgtggcccagaagaactggtacatcagcaagaaccccaaggacaagaggcatgtctggttcggcgagagcatgaccgatggattccagttcgagtatggcggccagggctccgaccctgccgatgtggccatccagctgaccttcctgcgcctgatgtccaccgaggcctcccagaacatcacctaccactgcaagaacagcgtggcctacatggaccagcagactggcaacctcaagaaggccctgctcctcaagggctccaacgagatcgagatccgcgccgagggcaacagccgcttcacctacagcgtcactgtcgatggctgcacgagtcacaccggagcctggggcaagacagtgattgaatacaaaaccaccaagtcctcccgcctgcccatcatcgatgtggcccccttggacgttggtgccccagaccaggaattcggcttcgacgttggccctgtctgcttcctgtaaactccctccatcccaacctggctccctcccacccaaccaactttccccccaacccggaaacagacaagcaacccaaactgaacccccccaaaagccaaaaaatgggagacaatttcacatggactttggaaaatatttttttcctttgcattcatctctcaaacttagtttttatctttgaccaaccgaacatgaccaaaaaccaaaagtgcattcaaccttaccaaaaaaaaaaaaaaaaaaaaaagaataaataaataagtttttaaaaaaggaagcttggtccacttgcttgaagacccatgcgggggtaagtccctttctgcccgttgggttatgaaaccccaatgctgccctttctgctcctttctccacaccccccttggcctcccctccactccttcccaaatctgtctccccagaagacacaggaaacaatgtattgtctgcccagcaatcaaaggcaatgctcaaacacccaagtggcccccaccctcagcccgctcctgcccgcccagcacccccaggccctggggacctggggttctcagactgccaaagaagccttgccatctggcgctcccatggctcttgcaacatctccccttcgtttttgagggggtcatgccgggggagccaccagcccctcactgggttcggaggagagtcaggaagggccacgacaaagcagaaacatcggatttggggaacgcgtgtcatcccttgtgccgcaggctgggcgggagagactgttctgttctgttccttgtgtaactgtgttgctgaaagactacctcgttcttgtcttgatgtgtcaccggggcaactgcctgggggcggggatgggggcagggtggaagcggctccccatttttataccaaaggtgctacatctatgtgatgggtggggtggggagggaatcactggtgctatagaaattgagatgcccccccaggccagcaaatgttcctttttgttcaaagtctatttttattccttgatattttttctttctttttttttttttttgtggatggggacttgtgaatttttctaaaggtgctatttaacatgggaggagagcgtgtgcgctccagcccagcccgctgctcactttccaccctctctccacctgcctctggcttctcaggcctctgctctccgacctctctcctctgaaaccctcctccacagctgcagcccatcctcccggctccctcctagtctgtcctgcgtcctctgtccccgggtttcagagacaacttcccaaagcacaaagcagtttttccctaggggtgggaggaagcaaaagactctgtacctattttgtatgtgtataataatttgagatgtttttaattattttgattgctggaataaagcatgtggaaatgacccaaacataa

SEQ ID NO: 33 - DNA, 1204 bp, Homo sapiens
cggaacgagggcaacctgcacagccatgcccgggcaagaactcaggacggtgaatggctctcagatgctcctggtgttgctggtgctctcgtggctgccgcatgggggcgccctgtctctggccgaggcgagccgcgcaagtttcccgggaccctcagagttgcactccgaagactccagattccgagagttgcggaaacgctacgaggacctgctaaccaggctgcgggccaaccagagctgggaagattcgaacaccgacctcgtcccggcccctgcagtccggatactcacgccagaagtgcggctgggatccggcggccacctgcacctgcgtatctctcgggccgcccttcccgaggggctccccgaggcctcccgccttcaccgggctctgttccggctgtccccgacggcgtcaaggtcgtgggacgtgacacgaccgctgcggcgtcagctcagccttgcaagaccccaagcgcccgcgctgcacctgcgactgtcgccgccgccgtcgcagtcggaccaactgctggcagaatcttcgtccgcacggccccagctggagttgcacttgcggccgcaagccgccagggggcgccgcagagcgcgtgcgcgcaacggggacgactgtccgctcgggcccgggcgttgctgccgtctgcacacggtccgcgcgtcgctggaagacctgggctgggccgattgggtgctgtcgccacgggaggtgcaagtgaccatgtgcatcggcgcgtgcccgagccagttccgggcggcaaacatgcacgcgcagatcaagacgagcctgcaccgcctgaagcccgacacggagccagcgccctgctgcgtgcccgccagctacaatcccatggtgctcattcaaaagaccgacaccggggtgtcgctccagacctatgatgacttgttagccaaagactgccactgcatatgagcagtcctggtccttccactgtgcacctgcgcgggggaggcgacctcagttgtcctgccctgtggaatgggctcaaggttcctgagacacccgattcctgcccaaacagctgtatttatataagtctgttatttattattaatttattggggtgaccttcttggggactcgggggctggtctgatggaactgtgtatttatttaaaactctggtgataaaaataaagctgtctgaactgttaaaaaaaaaaa

SEQ ID NO: 34 - DNA, 5221 bp, Homo sapiens
ataaaagggggctgaggaaataccggacacggtcacccgttgccagctctagcctttaaattcccggctcggggacctccacgcaccgcggctagcgccgacaaccagctagcgtgcaaggcgccgcggctcagcgcgtaccggcgggcttcgaaaccgcagtcctccggcgaccccgaactccgctccggagcctcagccccctggaaagtgatcccggcatccgagagccaagatgccggcccacttgctgcaggacgatatctctagctcctataccaccaccaccaccattacagcgcctccctccagggtcctgcagaatggaggagataagttggagacgatgcccctctacttggaagacgacattcgccctgatataaaagatgatatatatgaccccacctacaaggataaggaaggcccaagccccaaggttgaatatgtctggagaaacatcatccttatgtctctgctacacttgggagccctgtatgggatcactttgattcctacctgcaagttctacacctggctttggggggtattctactattttgtcagtgccctgggcataacagcaggagctcatcgtctgtggagccaccgctcttacaaagctcggctgcccctacggctctttctgatcattgccaacacaatggcattccagaatgatgtctatgaatgggctcgtgaccaccgtgcccaccacaagttttcagaaacacatgctgatcctcataattcccgacgtggctttttcttctctcacgtgggttggctgcttgtgcgcaaacacccagctgtcaaagagaaggggagtacgctagacttgtctgacctagaagctgagaaactggtgatgttccagaggaggtactacaaacctggcttgctgctgatgtgcttcatcctgcccacgcttgtgccctggtatttctggggtgaaacttttcaaaacagtgtgttcgttgccactttcttgcgatatgctgtggtgcttaatgccacctggctggtgaacagtgctgcccacctcttcggatatcgtccttatgacaagaacattagcccccgggagaatatcctggtttcacttggagctgtgggtgagggcttccacaactaccaccactcctttccctatgactactctgccagtgagtaccgctggcacatcaacttcaccacattcttcattgattgcatggccgccctcggtctggcctatgaccggaagaaagtctccaaggccgccatcttggccaggattaaaagaaccggagatggaaactacaagagtggctgagtttggggtccctcaggtttcctttttcaaaaaccagccaggcagaggttttaatgtctgtttattaactactgaataatgctaccaggatgctaaagatgatgatgttaacccattccagtacagtattcttttaaaattcaaaagtattgaaagccaacaactctgcctttatgatgctaagctgatattatttcttctcttatcctctctctcttctaggcccattgtcctccttttcactttattgctatcgccctcctttcccttattgcctcccaggcaagcagctggtcagtctttgctcagtgtccagcttccaaagcctagacaacctttctgtagcctaaaacgaatggtctttgctccagataactctctttccttgagctgttgtgagctttgaagtaggtggcttgagctagagataaaacagaatcttctgggtagtcccctgttgattatcttcagcccaggcttttgctagatggaatggaaaagcaacttcatttgacacaaagcttctaaagcaggtaaattgtcgggggagagagttagcatgtatgaatgtaaggatgagggaagcgaagcaagaggaacctctcgccatgatcagacatacagctgcctacctaatgaggacttcaagccccaccacatagcatgcttcctttctctcctggctcggggtaaaaagtggctgcggtgtttggcaatgctaattcaatgccgcaacatatagttgaggccgaggataaagaaaagacattttaagtttgtagtaaaagtggtctctgctggggaagggttttcttttctttttttctttaataacaaggagatttcttagttcatatatcaagaagtcttgaagttgggtgtttccagaattggtaaaaacagcagctcatggaattttgagtattccatgagctgctcattacagttctttcctctttctgctctgccatcttcaggatattggttcttcccctcatagtaataagatggctgtggcatttccaaacatccaaaaaaagggaaggatttaaggaggtgaagtcgggtcaaaaataaaatatatatacatatatacattgcttagaacgttaaactattagagtatttcccttccaaagagggatgtttggaaaaaactctgaaggagaggaggaattagttgggatgccaatttcctctccactgctggacatgagatggagaggctgagggacaggatctataggcagcttctaagagcgaacttcacataggaagggatctgagaacacgttgccaggggcttgagaaggttactgagtgagttattgggagtcttaataaaataaactagatattaggtccattcattaattagttccagtttctccttgaaatgagtaaaaactagaaggcttctctccacagtgttgtgccccttcactcatttttttttgaggagaagggggtctctgttaacatctagcctaaagtatacaactgcctggggggcagggttaggaatctcttcactaccctgattcttgattcctggctctaccctgtctgtcccttttctttgaccagatctttctcttccctgaacgttttcttctttccctggacaggcagcctcctttgtgtgtattcagaggcagtgatgacttgctgtccaggcagctccctcctgcacacagaatgctcagggtcactgaaccactgcttctcttttgaaagtagagctagctgccactttcacgtggcctccgcagtgtctccacctacacccctgtgctcccctgccacactgatggctcaagacaaggctggcaaaccctcccagaaacatctctggcccagaaagcctctctctccctccctctctcatgaggcacagccaagccaagcgctcatgttgagccagtgggccagccacagagcaaaagagggtttattttcagtcccctctctctgggtcagaaccagagggcatgctgaatgccccctgcttacttggtgagggtgccccgcctgagtcagtgctctcagctggcagtgcaatgcttgtagaagtaggaggaaacagttctcactgggaagaagcaagggcaagaacccaagtgcctcacctcgaaaggaggccctgttccctggagtcagggtgaactgcaaagctttggctgagacctgggatttgagataccacaaaccctgctgaacacagtgtctgttcagcaaactaaccagcattccctacagcctagggcagacaatagtatagaagtctggaaaaaaacaaaaacagaatttgagaaccttggaccactcctgtccctgtagctcagtcatcaaagcagaagtctggctttgctctattaagattggaaatgtacactaccaaacactcagtccactgttgagccccagtgctggaagggaggaaggcctttcttctgtgttaattgcgtagaggctacaggggttagcctggactaaaggcatccttgtcttttgagctattcacctcagtagaaaaggatctaagggaagatcactgtagtttagttctgttgacctgtgcacctaccccttggaaatgtctgctggtatttctaattccacaggtcatcagatgcctgcttgataatatataaacaataaaaacaactttcacttcttcctattgtaatcgtgtgccatggatctgatctgtaccatgaccctacataaggctggatggcacctcaggctgagggccccaatgtatgtgtggctgtgggtgtgggtgggagtgtgtctgctgagtaaggaacacgattttcaagattctaaagctcaattcaagtgacacattaatgataaactcagatctgatcaagagtccggatttctaacagtccctgctttggggggtgtgctgacaacttagctcaggtgccttacatcttttctaatcacagtgttgcatatgagcctgccctcactccctctgcagaatccctttgcacctgagaccctactgaagtggctggtagaaaaaggggcctgagtggaggattatcagtatcacgatttgcaggattcccttctgggcttcattctggaaacttttgttagggctgcttttcttaagtgcccacatttgatggagggtggaaataatttgaatgtatttgatttataagtttttttttttttttgggttaaaagatggttgtagcatttaaaatggaaaattttctccttggtttgctagtatcttgggtgtattctctgtaagtgtagctcaaataggtcatcatgaaaggttaaaaaagcgaggtggccatgttatgctggtggttaaggccagggcctctccaaccactgtgccactgacttgctgtgtgaccctgggcaagtcacttaactataaggtgcctcagttttccttctgttaaaatggggataataatactgacctacctcaaagggcagttttgaggcatgactaatgctttttagaaagcattttgggatccttcagcacaggaattctcaagacctgagtattttttataataggaatgtccaccatgaacttgatacgtccgtgtgtcccagatgctgtcattagtctatatggttctccaagaaactgaatgaatccattggagaagcggtggataactagccagacaaaatttgagaatacataaacaacgcattgccacggaaacatacagaggatgccttttctgtgattgggtgggattttttccctttttatgtgggatatagtagttacttgtgacaaaaataattttggaataatttctattaatatcaactctgaagctaattgtactaatctgagattgtgtttgttcataataaaagtgaagtgaatctaaaaaaaaaaaaaaa

SEQ ID NO: 35 - DNA, 799 bp, Homo sapiens
cactcccaaagaactgggtactcaacactgagcagatctgttctttgagctaaaaaccatgtgctgtaccaagagtttgctcctggctgctttgatgtcagtgctgctactccacctctgcggcgaatcagaagcagcaagcaactttgactgctgtcttggatacacagaccgtattcttcatcctaaatttattgtgggcttcacacggcagctggccaatgaaggctgtgacatcaatgctatcatctttcacacaaagaaaaagttgtctgtgtgcgcaaatccaaaacagacttgggtgaaatatattgtgcgtctcctcagtaaaaaagtcaagaacatgtaaaaactgtggcttttctggaatggaattggacatagcccaagaacagaaagaaccttgctggggttggaggtttcacttgcacatcatggagggtttagtgcttatctaatttgtgcctcactggacttgtccaattaatgaagttgattcatattgcatcatagtttgctttgtttaagcatcacattaaagttaaactgtattttatgttatttatagctgtaggttttctgtgtttagctatttaatactaattttccataagctattttggtttagtgcaaagtataaaattatatttgggggggaataagattatatggactttcttgcaagcaacaagctattttttaaaaaaactatttaacattcttttgtttatattgttttgtctcctaaattgttgtaattgcattataaaataagaaaaacattaataagacaaatatt

SEQ ID NO: 36 - DNA, 2993 bp, Homo sapiens
cgctggggcgctttccgaggaaattcgggactcgagtttcccggggaagaggcgcggcctgagcccggcgagggtggggagggcaggcgcaggtggaccccggcgccccccgagccccgctgtgaccttggccgcgggggaggggctgggccgctgcggggcagtcgcggccgccagagggggcagcggagaagaacttgcccaacttggcggcgcgggctggggcggctctgcgcctccgcgcccgcctccccggcctccgccttctcccctcccgcgagcctcctcccctcccgcgagcctcctcccctgggccctcctcccgtcctccccgccgccgccggtcccggtgcgcgcccatccctgcccgcagccccgcgcgccggccgagtcgctgagccgcggctgccggacgggacgggaccggctaggctgggcgcgccccccgggccccgccgtgggcatgggcgcactggcccgggcgctgctgctgcctctgctggcccagtggctcctgcgcgccgccccggagctggcccccgcgcccttcacgctgcccctccgggtggccgcggccacgaaccgcgtagttgcgcccaccccgggacccgggacccctgccgagcgccacgccgacggcttggcgctcgccctggagcctgccctggcgtcccccgcgggcgccgccaacttcttggccatggtagacaacctgcagggggactctggccgcggctactacctggagatgctgatcgggacccccccgcagaagctacagattctcgttgacactggaagcagtaactttgccgtggcaggaaccccgcactcctacatagacacgtactttgacacagagaggtctagcacataccgctccaagggctttgacgtcacagtgaagtacacacaaggaagctggacgggcttcgttggggaagacctcgtcaccatccccaaaggcttcaatacttcttttcttgtcaacattgccactatttttgaatcagagaatttctttttgcctgggattaaatggaatggaatacttggcctagcttatgccacacttgccaagccatcaagttctctggagaccttcttcgactccctggtgacacaagcaaacatccccaacgttttctccatgcagatgtgtggagccggcttgcccgttgctggatctgggaccaacggaggtagtcttgtcttgggtggaattgaaccaagtttgtataaaggagacatctggtatacccctattaaggaagagtggtactaccagatagaaattctgaaattggaaattggaggccaaagccttaatctggactgcagagagtataacgcagacaaggccatcgtggacagtggcaccacgctgctgcgcctgccccagaaggtgtttgatgcggtggtggaagctgtggcccgcgcatctctgattccagaattctctgatggtttctggactgggtcccagctggcgtgctggacgaattcggaaacaccttggtcttacttccctaaaatctccatctacctgagagacgagaactccagcaggtcattccgtatcacaatcctgcctcagctttacattcagcccatgatgggggccggcctgaattatgaatgttaccgattcggcatttccccatccacaaatgcgctggtgatcggtgccacggtgatggagggcttctacgtcatcttcgacagagcccagaagagggtgggcttcgcagcgagcccctgtgcagaaattgcaggtgctgcagtgtctgaaatttccgggcctttctcaacagaggatgtagccagcaactgtgtccccgctcagtctttgagcgagcccattttgtggattgtgtcctatgcgctcatgagcgtctgtggagccatcctccttgtcttaatcgtcctgctgctgctgccgttccggtgtcagcgtcgcccccgtgaccctgaggtcgtcaatgatgagtcctctctggtcagacatcgctggaaatgaatagccaggcctgacctcaagcaaccatgaactcagctattaagaaaatcacatttccagggcagcagccgggatcgatggtggcgctttctcctgtgcccacccgtcttcaatctctgttctgctcccagatgccttctagattcactgtcttttgattcttgattttcaagctttcaaatcctccctacttccaagaaaaataattaaaaaaaaaacttcattctaaaccaaaacagagtggattgggctgcaggctctatggggttcgttatgccaaagtgtctacatgtgccaccaacataaaacaaaaccaagccttggctcgttctcttctctcttcaatctctggaaaaataagtacatatagttgataacccctcttagcttacaggaagctttttgtattaattgcctttgaggttattttccgccagacctcaacctgggtcaaagtggtacaggaaggcttgcagtatgatggcaggagaatcagcctggggcctggggatgtaaccaagctgtacccttgagacctggaaccagagccacaggccccttttgtgggtttctctgtgctctgaatgggagccagaattcactaggaggtcatcaaccgatggtcctcacaagcctcttctgaagatggaaggccttttgcccgttgaggtagaggggaaggaaatctcctcttttgtacccaatacttatgttgtattgttggtgcgaaagtaaaaacactacctcttttgagactttgcccagggtcctgtgcctggatgggggtgcaggcagccttgaccacggctgttcccctcacccaaaagaattatcatcccaacagccaagacccaacaggtgctgaactgtgcatcaaccaggaagagttctatccccaagctggccactatcacatatgcttactcttgcttaaaattaataaatcatgttttgatgagaaaaaactattcta

SEQ ID NO: 37 - DNA, 1381 bp, Homo sapiens
atgcgcgatctcccggagcatgcgcagcagcggcgccgacgcggggcggtgcctggtgaccgcgcgcgctcccggaagtgtgccggcgtcgcgcgaaggttcagcagggagccgtgggccgggcgcgcggttcccggcacgtgtctcggcacgtggcagcgcgcctggccctgggcttggaggcgccggcgccctggatccgccggccgtggtcgccgagtcggtgtcgtccttgaccatcgccgacgcgttcattgcagccggcgagagctcagctccgaccccgccgcgccccgcgcttcccaggaggttcatctgctccttccctgactgcagcgccaattacagcaaagcctggaagcttgacgcgcacctgtgcaagcacacgggggagagaccatttgtttgtgactatgaagggtgtggcaaggccttcatcagggactaccatctgagccgccacattctgactcacacaggagaaaagccgtttgtttgtgcagccaatggctgtgatcaaaaattcaacacaaaatcaaacttgaagaaacattttgaacgcaaacatgaaaatcaacaaaaacaatatatatgcagttttgaagactgtaagaagacctttaagaaacatcagcagctgaaaatccatcagtgccagaataccaatgaacctctattcaagtgtacccaggaaggatgtgggaaacactttgcatcacccagcaagctgaaacgacatgccaaggcccacgagggctatgtatgtcaaaaaggatgttcctttgtggcaaaaacatggacggaacttctgaaacatgtgagagaaacccataaagaggaaatactatgtgaagtatgccggaaaacatttaaacgcaaagattaccttaagcaacacatgaaaactcatgccccagaaagggatgtatgtcgctgtccaagagaaggctgtggaagaacctatacaactgtgtttaatctccaaagccatatcctctccttccatgaggaaagccgcccttttgtgtgtgaacatgctggctgtggcaaaacatttgcaatgaaacaaagtctcactaggcatgctgttgtacatgatcctgacaagaagaaaatgaagctcaaagtcaaaaaatctcgtgaaaaacgggagtttggcctctcatctcagtggatatatcctcccaaaaggaaacaagggcaaggcttatctttgtgtcaaaacggagagtcacccaactgtgtggaagacaagatgctctcgacagttgcagtacttacccttggctaagaactgcactgctttgtttaaaggactgcagaccaaggagtcgagctttctctcagagcatgcttttctttattaaaattactgatgcag

SEQ ID NO: 38 - DNA, 4720 bp, Homo sapiens
gcgagacctagcaggcccggggctgggcgtgccctcgcctgccacgctgcgcgctgccctcagccgggccgctggggccgtgcagtgcaccgggcacgccgcgccaggctgggggcaggcaccgagcctccgtgggaggtcccgaggcagcttcgcctgctcgccctggctccagccctcacctgccgcagccttagctgagcagccgccgccactgggcgccccccgctccccacttcgccagcgcccgctcctcggctcggcccggggtagtttgtagggacgcagctctccacgtgcgcgactgcgaggctggacgctacgggctcctggaaaggagacaccagcatttgccacaatgctgtcatccactgactttacatttgcttcctgggagcttgtggtccgcgttgaccatcccaatgaagagcagcagaaagacgtcacactgagagtatctggagaccttcatgttggaggagtgatgctcaagttagtagaacagatcaatatatcccaagactggtcagactttgctctttggtgggaacagaagcattgctggcttctgaaaacccactggaccctggacaaatatggggtccaggcagatgcaaagcttctcttcacccctcagcataaaatgctgcgccttcgtctgccgaatttgaagatggtgaggttgcgagtcagcttctcagctgtggtttttaaagctgtcagtgatatctgcaaaatcctgaatattagaagatcagaagagctttccttgttaaagccgtctggtgactattttaagaagaagaagaaaaaagacaaaaataataaggaacccataattgaagatattctaaacctggagagttctccaacagcttcaggttcatcagtaagtcctggtttatacagtaaaaccatgacccctatatatgaccccatcaatggaacaccagcatcatccaccatgacttggttcagtgacagccctttgacggaacaaaactgcagcatcctcgcattcagccaacccccccagtccccagaagcacttgcggatatgtaccagcctcggtctctggttgataaagccaagctcaatgcaggttggctagactcctcacgctcccttatggaacaaggcatccaagaggatgagcagctgctcttacgatttaaatattattctttcttcgacttgaatcctaaatatgatgctgtccgaataaaccaactctatgagcaagccaggtgggccattctcttagaagaaattgattgcacagaggaagaaatgttgatctttgcagctctacagtaccacattagcaaactgtcgttgtctgctgaaacacaggattttgcaggcgagtccgaggttgatgaaatagaagcggcgctttctaatttggaagtaaccctagaaggtggaaaagcggacagccttttggaggacattactgatatccctaaacttgcagataatctcaaattatttaggcccaagaagttactaccaaaagctttcaaacaatattggtttatctttaaagacacatccatagcatactttaaaaataaggaacttgaacaaggagaaccactagaaaaactaaatcttagaggctgcgaagttgtgcccgatgtaaatgtagcaggaagaaaatttggaatcaagttactaatccctgttgccgatggtatgaatgaaatgtatttgagatgtgaccatgagaatcaatacgcccaatggatggctgcctgcatgttggcatcgaagggcaaaaccatggcagacagctcctaccagccagaggtcctcaacatcctttcatttctgaggatgaaaaacaggaactctgcatctcaggtggcttccagtctcgaaaacatggatatgaacccagaatgttttgtgtcaccacggtgtgcaaagaaacacaaatccaaacagctggccgcccggatcctggaggcgcaccagaacgtggcccagatgcccctggtcgaagccaagctgcggttcatccaggcgtggcagtcactgcctgagtttggcctcacctactaccttgtcagatttaaaggaagcaaaaaagatgacattctgggagtttcatataacaggttgattaaaattgatgcagccaccgggattccagtgacaacatggagattcacaaatatcaaacagtggaatgtaaactgggaaacccggcaggtggtcatcgagtttgaccaaaacgtctttactgctttcacctgcctgagtgcagattgcaagattgtgcacgagtacattggcggctacattttcttgtccacccgctccaaggaccagaatgaaacactcgatgaggacttgttccacaaattgaccggcggtcaggattgaaacaagcacgcgtgctcggctcacaccaacaaggcaagccaaaggcgcccctccccagagggatccctaacgtgcccagcatgtagattctggactaacagacaacatacattcaccgctggtcacccagatcctcattcaaacccactgctggcacatccctttccttactttgccctgtgctaccagccacggaaggagcctctcttgttttttctataaaatgggtaggcaggagaaaagcaggtgccctaagattgctctaaggcccagcatgtggttacagttctctgacttgcagaacctgccaggtgtatggctacaagttatcctcgtgctgatctgtctcattactaagtcaatggagaagacagaaaggtaaaaatcacgtgtagcaagaacaactcttatttcacaaactcaggtatgaaacgaaacgcctgtccttcatggaactgcttttagctcctgtcttttcaaaatggcagagggagttcctacacacactttttccctggaggccaaggtctaggggtagaaaggggaggggtggggctaccaggtagcagttgacaacccaaggtcagaggagtggccctcagtgtcatctgtccacagtgatacctgccaagatgaccactgacccacatctggtcttagtcattggtctcctcagatttctggggccacctgcaagccccattccattcctacagatctctcagccacctgtaagtcctttgtgaagatgtgggtgacacagggggacaggaaaacccatttctcaacccagatccatgtctccactgcttctactctgggttgggattcaggaagacaggcacagtcctctctgttcatagaaacacctgccagtgtcaaggattccagtcaggtgtctatcccaactggtcagggagagaagggcagacccattctcaaagaccaccatgtccaaggtctgacagctccccactggctgcccccacaggggctttaggctggtctgggtcatggggaagcgtccctcttatcgctggtctgtgttctcctggatttggtatctatgttggtacgactcctggccttttatctaaaggactttggcttttgtaaatcacaagccaataatagacttttttctccccctctgttttttgctgtgtcatctctgccttgagactgccttgagacagtgcttgccttgagagagtgagccaattaacagctgcctgaattgtcattttccattttggtttgttagaggtgggaggggtgggttttgagaaggtcaaaagcaataccagaagtaaagggaaatatcagacaatattttattattttttcatagatgttctgccacacaaagaacttggggtgtaaggataaggcaaaagctccaatcccatttttcagttctcctaggatgcacccctcagggagcctggccagagttccgaggctcgtgagcgtcagctgttgctttattttccatcaaagccctctgagaagtgagacctcagcaattccgggagccacatagagacagacttggcaagggaccccctggttctgagccagtagctgccatctggaaattcctcttttagcctctccttagaggtgaatgtgaatgaagcctcccaggcacccgctgaatttctgaggccttgcttaaagctcagaagtggtttaggcatttggaaaatctggttcacatcataaagaacttgatttgaaatgttttctatagaaacaagtgctaagtgtaccgtattatacttgatgttggtcatttctcagtcctatttctcagttctattattttagaacctagtcagttctttaagattataactggtcctacattaaaataatgcttctcgatgtcagattttacctgtttgctgctgagaacatctctgcctaatttaccaaagccagaccttcagttcaacatgcttccttagcttttcatagttgtctgacatttccatgaaaacaaaggaaccaactttgttttaaccaaactttgtttggttacagttttcaggggagcgtttcttccatgacacacagcaacatcccaaagaaataaacaagtgtgacaaaaaaaaaaaaaaacaaacctaaatgctactgttccaaagagcaacttgatggttttttttaatactgagtgcaaaaggtcacccaaattcctatgatgaaattttaaattaatgggcacctttcaacatcatttgcttccttatctacagttgattcagaaatctgcattttttattcttttatatgacttttaagtaaaagatttatatggatttg

SEQ ID NO: 39 - DNA, 3213 bp, Homo sapiens
agagactcaagatgattccctttttacccatgttttctctactattgctgcttattgttaaccctataaacgccaacaatcattatgacaagatcttggctcatagtcgtatcaggggtcgggaccaaggcccaaatgtctgtgcccttcaacagattttgggcaccaaaaagaaatacttcagcacttgtaagaactggtataaaaagtccatctgtggacagaaaacgactgttttatatgaatgttgccctggttatatgagaatggaaggaatgaaaggctgcccagcagttttgcccattgaccatgtttatggcactctgggcatcgtgggagccaccacaacgcagcgctattctgacgcctcaaaactgagggaggagatcgagggaaagggatccttcacttactttgcaccgagtaatgaggcttgggacaacttggattctgatatccgtagaggtttggagagcaacgtgaatgttgaattactgaatgctttacatagtcacatgattaataagagaatgttgaccaaggacttaaaaaatggcatgattattccttcaatgtataacaatttggggcttttcattaaccattatcctaatggggttgtcactgttaattgtgctcgaatcatccatgggaaccagattgcaacaaatggtgttgtccatgtcattgaccgtgtgcttacacaaattggtacctcaattcaagacttcattgaagcagaagatgacctttcatcttttagagcagctgccatcacatcggacatattggaggcccttggaagagacggtcacttcacactctttgctcccaccaatgaggcttttgagaaacttccacgaggtgtcctagaaaggttcatgggagacaaagtggcttccgaagctcttatgaagtaccacatcttaaatactctccagtgttctgagtctattatgggaggagcagtctttgagacgctggaaggaaatacaattgagataggatgtgacggtgacagtataacagtaaatggaatcaaaatggtgaacaaaaaggatattgtgacaaataatggtgtgatccatttgattgatcaggtcctaattcctgattctgccaaacaagttattgagctggctggaaaacagcaaaccaccttcacggatcttgtggcccaattaggcttggcatctgctctgaggccagatggagaatacactttgctggcacctgtgaataatgcattttctgatgatactctcagcatggttcagcgcctccttaaattaattctgcagaatcacatattgaaagtaaaagttggccttaatgagctttacaacgggcaaatactggaaaccatcggaggcaaacagctcagagtcttcgtatatcgtacagctgtctgcattgaaaattcatgcatggagaaagggagtaagcaagggagaaacggtgcgattcacatattccgcgagatcatcaagccagcagagaaatccctccatgaaaagttaaaacaagataagcgctttagcaccttcctcagcctacttgaagctgcagacttgaaagagctcctgacacaacctggagactggacattatttgtgccaaccaatgatgcttttaagggaatgactagtgaagaaaaagaaattctgatacgggacaaaaatgctcttcaaaacatcattctttatcacctgacaccaggagttttcattggaaaaggatttgaacctggtgttactaacattttaaagaccacacaaggaagcaaaatctttctgaaagaagtaaatgatacacttctggtgaatgaattgaaatcaaaagaatctgacatcatgacaacaaatggtgtaattcatgttgtagataaactcctctatccagcagacacacctgttggaaatgatcaactgctggaaatacttaataaattaatcaaatacatccaaattaagtttgttcgtggtagcaccttcaaagaaatccccgtgactgtctatacaactaaaattataaccaaagttgtggaaccaaaaattaaagtgattgaaggcagtcttcagcctattatcaaaactgaaggacccacactaacaaaagtcaaaattgaaggtgaacctgaattcagactgattaaagaaggtgaaacaataactgaagtgatccatggagagccaattattaaaaaatacaccaaaatcattgatggagtgcctgtggaaataactgaaaaagagacacgagaagaacgaatcattacaggtcctgaaataaaatacactaggatttctactggaggtggagaaacagaagaaactctgaagaaattgttacaagaagaggtcaccaaggtcaccaaattcattgaaggtggtgatggtcatttatttgaagatgaagaaattaaaagactgcttcagggagacacacccgtgaggaagttgcaagccaacaaaaaagttcaaggttctagaagacgattaagggaaggtcgttctcagtgaaaatccaaaaaccagaaaaaaatgtttatacaaccctaagtcaataacctgaccttagaaaattgtgagagccaagttgacttcaggaactgaaacatcagcacaaagaagcaatcatcaaataattctgaacacaaatttaatatttttttttctgaatgagaaacatgagggaaattgtggagttagcctcctgtggtaaaggaattgaagaaaatataacaccttacaccctttttcatcttgacattaaaagttctggctaactttggaatccattagagaaaaatccttgtcaccagattcattacaattcaaatcgaagagttgtgaactgttatcccattgaaaagaccgagccttgtatgtatgttatggatacataaaatgcacgcaagccattatctctccatgggaagctaagttataaaaataggtgcttggtgtacaaaactttttatatcaaaaggctttgcacatttctatatgagtgggtttactggtaaattatgttattttttacaactaattttgtactctcagaatgtttgtcatatgcttcttgcaatgcatattttttaatctcaaacgtttcaataaaaccatttttcagatataaagagaattacttcaaattgagtaattcagaaaaactcaagatttaagttaaaaagtggtttggacttgggaa

SEQ ID NO: 40 - DNA, 2133 bp, Homo sapiens
cgggagagcgcgctctgcctgccgcctgcctgcctgccactgagggttcccagcaccatgagggcctggatcttctttctcctttgcctggccgggagggccttggcagcccctcagcaagaagccctgcctgatgagacagaggtggtggaagaaactgtggcagaggtgactgaggtatctgtgggagctaatcctgtccaggtggaagtaggagaatttgatgatggtgcagaggaaaccgaagaggaggtggtggcggaaaatccctgccagaaccaccactgcaaacacggcaaggtgtgcgagctggatgagaacaacacccccatgtgcgtgtgccaggaccccaccagctgcccagcccccattggcgagtttgagaaggtgtgcagcaatgacaacaagaccttcgactcttcctgccacttctttgccacaaagtgcaccctggagggcaccaagaagggccacaagctccacctggactacatcgggccttgcaaatacatccccccttgcctggactctgagctgaccgaattccccctgcgcatgcgggactggctcaagaacgtcctggtcaccctgtatgagagggatgaggacaacaaccttctgactgagaagcagaagctgcgggtgaagaagatccatgagaatgagaagcgcctggaggcaggagaccaccccgtggagctgctggcccgggacttcgagaagaactataacatgtacatcttccctgtacactggcagttcggccagctggaccagcaccccattgacgggtacctctcccacaccgagctggctccactgcgtgctcccctcatccccatggagcattgcaccacccgctttttcgagacctgtgacctggacaatgacaagtacatcgccctggatgagtgggccggctgcttcggcatcaagcagaaggatatcgacaaggatcttgtgatctaaatccactccttccacagtaccggattctctctttaaccctccccttcgtgtttcccccaatgtttaaaatgtttggatggtttgttgttctgcctggagacaaggtgctaacatagatttaagtgaatacattaacggtgctaaaaatgaaaattctaacccaagacatgacattcttagctgtaacttaactattaaggccttttccacacgcattaatagtcccatttttctcttgccatttgtagctttgcccattgtcttattggcacatgggtggacacggatctgctgggctctgccttaaacacacattgcagcttcaacttttctctttagtgttctgtttgaaactaatacttaccgagtcagactttgtgttcatttcatttcagggtcttggctgcctgtgggcttccccaggtggcctggaggtgggcaaagggaagtaacagacacacgatgttgtcaaggatggttttgggactagaggctcagtggtgggagagatccctgcagaatccaccaaccagaacgtggtttgcctgaggctgtaactgagagaaagattctggggctgtcttatgaaaatatagacattctcacataagcccagttcatcaccatttcctcctttacctttcagtgcagtttcttttcacattaggctgttggttcaaacttttgggagcacggactgtcagttctctgggaagtggtcagcgcatcctgcagggcttctcctcctctgtcttttggagaaccagggctcttctcaggggctctagggactgccaggctgtttcagccaggaaggccaaaatcaagagtgagatgtagaaagttgtaaaatagaaaaagtggagttggtgaatcggttgttctttcctcacatttggatgattgtcataaggtttttagcatgttcctccttttcttcaccctcccctttgttcttctattaatcaagagaaacttcaaagttaatgggatggtcggatctcacaggctgagaactcgttcacctccaagcatttcatgaaaaagctgcttcttattaatcatacaaactctcaccatgatgtgaagagtttcacaaatctttcaaaataaaaagtaatgacttagaaactgaaaaaaaaaaaaaaaaaaaaaaaaaaaaaa

SEQ ID NO: 41 - DNA, 2691 bp, Homo sapiens
gcttgcccgtcggtcgctagctcgctcggtgcgcgtcgtcccgctccatggcgctcttcgtgcggctgctggctctcgccctggctctggccctgggccccgccgcgaccctggcgggtcccgccaagtcgccctaccagctggtgctgcagcacagcaggctccggggccgccagcacggccccaacgtgtgtgctgtgcagaaggttattggcactaataggaagtacttcaccaactgcaagcagtggtaccaaaggaaaatctgtggcaaatcaacagtcatcagctacgagtgctgtcctggatatgaaaaggtccctggggagaagggctgtccagcagccctaccactctcaaacctttacgagaccctgggagtcgttggatccaccaccactcagctgtacacggaccgcacggagaagctgaggcctgagatggaggggcccggcagcttcaccatcttcgcccctagcaacgaggcctgggcctccttgccagctgaagtgctggactccctggtcagcaatgtcaacattgagctgctcaatgccctccgctaccatatggtgggcaggcgagtcctgactgatgagctgaaacacggcatgaccctcacctctatgtaccagaattccaacatccagatccaccactatcctaatgggattgtaactgtgaactgtgcccggctcctgaaagccgaccaccatgcaaccaacggggtggtgcacctcatcgataaggtcatctccaccatcaccaacaacatccagcagatcattgagatcgaggacacctttgagacccttcgggctgctgtggctgcatcagggctcaacacgatgcttgaaggtaacggccagtacacgcttttggccccgaccaatgaggccttcgagaagatccctagtgagactttgaaccgtatcctgggcgacccagaagccctgagagacctgctgaacaaccacatcttgaagtcagctatgtgtgctgaagccatcgttgcggggctgtctgtagagaccctggagggcacgacactggaggtgggctgcagcggggacatgctcactatcaacgggaaggcgatcatctccaataaagacatcctagccaccaacggggtgatccactacattgatgagctactcatcccagactcagccaagacactatttgaattggctgcagagtctgatgtgtccacagccattgaccttttcagacaagccggcctcggcaatcatctctctggaagtgagcggttgaccctcctggctcccctgaattctgtattcaaagatggaacccctccaattgatgcccatacaaggaatttgcttcggaaccacataattaaagaccagctggcctctaagtatctgtaccatggacagaccctggaaactctgggcggcaaaaaactgagagtttttgtttatcgtaatagcctctgcattgagaacagctgcatcgcggcccacgacaagagggggaggtacgggaccctgttcacgatggaccgggtgctgacccccccaatggggactgtcatggatgtcctgaagggagacaatcgctttagcatgctggtagctgccatccagtctgcaggactgacggagaccctcaaccgggaaggagtctacacagtctttgctcccacaaatgaagccttccgagccctgccaccaagagaacggagcagactcttgggagatgccaaggaacttgccaacatcctgaaataccacattggtgatgaaatcctggttagcggaggcatcggggccctggtgcggctaaagtctctccaaggtgacaagctggaagtcagcttgaaaaacaatgtggtgagtgtcaacaaggagcctgttgccgagcctgacatcatggccacaaatggcgtggtccatgtcatcaccaatgttctgcagcctccagccaacagacctcaggaaagaggggatgaacttgcagactctgcgcttgagatcttcaaacaagcatcagcgttttccagggcttcccagaggtctgtgcgactagcccctgtctatcaaaagttattagagaggatgaagcattagcttgaagcactacaggaggaatgcaccacggcagctctccgccaatttctctcagatttccacagagactgtttgaatgttttcaaaaccaagtatcacactttaatgtacatgggccgcaccataatgagatgtgagccttgtgcatgtgggggaggagggagagagatgtactttttaaatcatgttccccctaaacatggctgttaacccactgcatgcagaaacttggatgtcactgcctgacattcacttccagagaggacctatcccaaatgtggaattgactgcctatgccaagtccctggaaaaggagcttcagtattgtggggctcataaaacatgaatcaagcaatccagcctcatgggaagtcctggcacagtttttgtaaagcccttgcacagctggagaaatggcatcattataagctatgagttgaaatgttctgtcaaatgtgtctcacatctacacgtggcttggaggcttttatggggccctgtccaggtagaaaagaaatggtatgtagagcttagatttccctattgtgacagagccatggtgtgtttgtaataataaaaccaaagaaacata

SEQ ID NO: 42 - DNA, 8027 bp, Homo sapiens
acgcccgcgccggctgtgctgcacagggggaggagagggaaccccaggcgcgagcgggaagaggggacctgcagccacaacttctctggtcctctgcatcccttctgtccctccacccgtccccttccccaccctctggcccccaccttcttggaggcgacaacccccgggaggcattagaagggatttttcccgcagttgcgaagggaagcaaacttggtggcaacttgcctcccggtgcgggcgtctctcccccaccgtctcaacatgcttaggggtccggggcccgggctgctgctgctggccgtccagtgcctggggacagcggtgccctccacgggagcctcgaagagcaagaggcaggctcagcaaatggttcagccccagtccccggtggctgtcagtcaaagcaagcccggttgttatgacaatggaaaacactatcagataaatcaacagtgggagcggacctacctaggcaatgcgttggtttgtacttgttatggaggaagccgaggttttaactgcgagagtaaacctgaagctgaagagacttgctttgacaagtacactgggaacacttaccgagtgggtgacacttatgagcgtcctaaagactccatgatctgggactgtacctgcatcggggctgggcgagggagaataagctgtaccatcgcaaaccgctgccatgaagggggtcagtcctacaagattggtgacacctggaggagaccacatgagactggtggttacatgttagagtgtgtgtgtcttggtaatggaaaaggagaatggacctgcaagcccatagctgagaagtgttttgatcatgctgctgggacttcctatgtggtcggagaaacgtgggagaagccctaccaaggctggatgatggtagattgtacttgcctgggagaaggcagcggacgcatcacttgcacttctagaaatagatgcaacgatcaggacacaaggacatcctatagaattggagacacctggagcaagaaggataatcgaggaaacctgctccagtgcatctgcacaggcaacggccgaggagagtggaagtgtgagaggcacacctctgtgcagaccacatcgagcggatctggccccttcaccgatgttcgtgcagctgtttaccaaccgcagcctcacccccagcctcctccctatggccactgtgtcacagacagtggtgtggtctactctgtggggatgcagtggctgaagacacaaggaaataagcaaatgctttgcacgtgcctgggcaacggagtcagctgccaagagacagctgtaacccagacttacggtggcaactcaaatggagagccatgtgtcttaccattcacctacaatggcaggacgttctactcctgcaccacggaagggcgacaggacggacatctttggtgcagcacaacttcgaattatgagcaggaccagaaatactctttctgcacagaccacactgttttggttcagactcgaggaggaaattccaatggtgccttgtgccacttccccttcctatacaacaaccacaattacactgattgcacttctgagggcagaagagacaacatgaagtggtgtgggaccacacagaactatgatgccgaccagaagtttgggttctgccccatggctgcccacgaggaaatctgcacaaccaatgaaggggtcatgtaccgcattggagatcagtgggataagcagcatgacatgggtcacatgatgaggtgcacgtgtgttgggaatggtcgtggggaatggacatgcattgcctactcgcagcttcgagatcagtgcattgttgatgacatcacttacaatgtgaacgacacattccacaagcgtcatgaagaggggcacatgctgaactgtacatgcttcggtcagggtcggggcaggtggaagtgtgatcccgtcgaccaatgccaggattcagagactgggacgttttatcaaattggagattcatgggagaagtatgtgcatggtgtcagataccagtgctactgctatggccgtggcattggggagtggcattgccaacctttacagacctatccaagctcaagtggtcctgtcgaagtatttatcactgagactccgagtcagcccaactcccaccccatccagtggaatgcaccacagccatctcacatttccaagtacattctcaggtggagacctaaaaattctgtaggccgttggaaggaagctaccataccaggccacttaaactcctacaccatcaaaggcctgaagcctggtgtggtatacgagggccagctcatcagcatccagcagtacggccaccaagaagtgactcgctttgacttcaccaccaccagcaccagcacacctgtgaccagcaacaccgtgacaggagagacgactcccttttctcctcttgtggccacttctgaatctgtgaccgaaatcacagccagtagctttgtggtctcctgggtctcagcttccgacaccgtgtcgggattccgggtggaatatgagctgagtgaggagggagatgagccacagtacctggatcttccaagcacagccacttctgtgaacatccctgacctgcttcctggccgaaaatacattgtaaatgtctatcagatatctgaggatggggagcagagtttgatcctgtctacttcacaaacaacagcgcctgatgcccctcctgacccgactgtggaccaagttgatgacacctcaattgttgttcgctggagcagaccccaggctcccatcacagggtacagaatagtctattcgccatcagtagaaggtagcagcacagaactcaaccttcctgaaactgcaaactccgtcaccctcagtgacttgcaacctggtgttcagtataacatcactatctatgctgtggaagaaaatcaagaaagtacacctgttgtcattcaacaagaaaccactggcaccccacgctcagatacagtgccctctcccagggacctgcagtttgtggaagtgacagacgtgaaggtcaccatcatgtggacaccgcctgagagtgcagtgaccggctaccgtgtggatgtgatccccgtcaacctgcctggcgagcacgggcagaggctgcccatcagcaggaacacctttgcagaagtcaccgggctgtcccctggggtcacctattacttcaaagtctttgcagtgagccatgggagggagagcaagcctctgactgctcaacagacaaccaaactggatgctcccactaacctccagtttgtcaatgaaactgattctactgtcctggtgagatggactccacctcgggcccagataacaggataccgactgaccgtgggccttacccgaagaggccagcccaggcagtacaatgtgggtccctctgtctccaagtaccccctgaggaatctgcagcctgcatctgagtacaccgtatccctcgtggccataaagggcaaccaagagagccccaaagccactggagtctttaccacactgcagcctgggagctctattccaccttacaacaccgaggtgactgagaccaccatcgtgatcacatggacgcctgctccaagaattggttttaagctgggtgtacgaccaagccagggaggagaggcaccacgagaagtgacttcagactcaggaagcatcgttgtgtccggcttgactccaggagtagaatacgtctacaccatccaagtcctgagagatggacaggaaagagatgcgccaattgtaaacaaagtggtgacaccattgtctccaccaacaaacttgcatctggaggcaaaccctgacactggagtgctcacagtctcctgggagaggagcaccaccccagacattactggttatagaattaccacaacccctacaaacggccagcagggaaattctttggaagaagtggtccatgctgatcagagctcctgcacttttgataacctgagtcccggcctggagtacaatgtcagtgtttacactgtcaaggatgacaaggaaagtgtccctatctctgataccatcatcccagctgttcctcctcccactgacctgcgattcaccaacattggtccagacaccatgcgtgtcacctgggctccacccccatccattgatttaaccaacttcctggtgcgttactcacctgtgaaaaatgaggaagatgttgcagagttgtcaatttctccttcagacaatgcagtggtcttaacaaatctcctgcctggtacagaatatgtagtgagtgtctccagtgtctacgaacaacatgagagcacacctcttagaggaagacagaaaacaggtcttgattccccaactggcattgacttttctgatattactgccaactcttttactgtgcactggattgctcctcgagccaccatcactggctacaggatccgccatcatcccgagcacttcagtgggagacctcgagaagatcgggtgccccactctcggaattccatcaccctcaccaacctcactccaggcacagagtatgtggtcagcatcgttgctcttaatggcagagaggaaagtcccttattgattggccaacaatcaacagtttctgatgttccgagggacctggaagttgttgctgcgacccccaccagcctactgatcagctgggatgctcctgctgtcacagtgagatattacaggatcacttacggagaaacaggaggaaatagccctgtccaggagttcactgtgcctgggagcaagtctacagctaccatcagcggccttaaacctggagttgattataccatcactgtgtatgctgtcactggccgtggagacagccccgcaagcagcaagccaatttccattaattaccgaacagaaattgacaaaccatcccagatgcaagtgaccgatgttcaggacaacagcattagtgtcaagtggctgccttcaagttcccctgttactggttacagagtaaccaccactcccaaaaatggaccaggaccaacaaaaactaaaactgcaggtccagatcaaacagaaatgactattgaaggcttgcagcccacagtggagtatgtggttagtgtctatgctcagaatccaagcggagagagtcagcctctggttcagactgcagtaaccaacattgatcgccctaaaggactggcattcactgatgtggatgtcgattccatcaaaattgcttgggaaagcccacaggggcaagtttccaggtacagggtgacctactcgagccctgaggatggaatccatgagctattccctgcacctgatggtgaagaagacactgcagagctgcaaggcctcagaccgggttctgagtacacagtcagtgtggttgccttgcacgatgatatggagagccagcccctgattggaacccagtccacagctattcctgcaccaactgacctgaagttcactcaggtcacacccacaagcctgagcgcccagtggacaccacccaatgttcagctcactggatatcgagtgcgggtgacccccaaggagaagaccggaccaatgaaagaaatcaaccttgctcctgacagctcatccgtggttgtatcaggacttatggtggccaccaaatatgaagtgagtgtctatgctcttaaggacactttgacaagcagaccagctcagggtgttgtcaccactctggagaatgtcagcccaccaagaagggctcgtgtgacagatgctactgagaccaccatcaccattagctggagaaccaagactgagacgatcactggcttccaagttgatgccgttccagccaatggccagactccaatccagagaaccatcaagccagatgtcagaagctacaccatcacaggtttacaaccaggcactgactacaagatctacctgtacaccttgaatgacaatgctcggagctcccctgtggtcatcgacgcctccactgccattgatgcaccatccaacctgcgtttcctggccaccacacccaattccttgctggtatcatggcagccgccacgtgccaggattaccggctacatcatcaagtatgagaagcctgggtctcctcccagagaagtggtccctcggccccgccctggtgtcacagaggctactattactggcctggaaccgggaaccgaatatacaatttatgtcattgccctgaagaataatcagaagagcgagcccctgattggaaggaaaaagacagacgagcttccccaactggtaacccttccacaccccaatcttcatggaccagagatcttggatgttccttccacagttcaaaagacccctttcgtcacccaccctgggtatgacactggaaatggtattcagcttcctggcacttctggtcagcaacccagtgttgggcaacaaatgatctttgaggaacatggttttaggcggaccacaccgcccacaacggccacccccataaggcataggccaagaccatacccgccgaatgtaggacaagaagctctctctcagacaaccatctcatgggccccattccaggacacttctgagtacatcatttcatgtcatcctgttggcactgatgaagaacccttacagttcagggttcctggaacttctaccagtgccactctgacaggcctcaccagaggtgccacctacaacatcatagtggaggcactgaaagaccagcagaggcataaggttcgggaagaggttgttaccgtgggcaactctgtcaacgaaggcttgaaccaacctacggatgactcgtgctttgacccctacacagtttcccattatgccgttggagatgagtgggaacgaatgtctgaatcaggctttaaactgttgtgccagtgcttaggctttggaagtggtcatttcagatgtgattcatctagatggtgccatgacaatggtgtgaactacaagattggagagaagtgggaccgtcagggagaaaatggccagatgatgagctgcacatgtcttgggaacggaaaaggagaattcaagtgtgaccctcatgaggcaacgtgttacgatgatgggaagacataccacgtaggagaacagtggcagaaggaatatctcggtgccatttgctcctgcacatgctttggaggccagcggggctggcgctgtgacaactgccgcagacctgggggtgaacccagtcccgaaggcactactggccagtcctacaaccagtattctcagagataccatcagagaacaaacactaatgttaattgcccaattgagtgcttcatgcctttagatgtacaggctgacagagaagattcccgagagtaaatcatctttccaatccagaggaacaagcatgtctctctgccaagatccatctaaactggagtgatgttagcagacccagcttagagttcttctttctttcttaagccctttgctctggaggaagttctccagcttcagctcaactcacagcttctccaagcatcaccctgggagtttcctgagggttttctcataaatgagggctgcacattgcctgttctgcttcgaagtattcaataccgctcagtattttaaatgaagtgattctaagatttggtttgggatcaataggaaagcatatgcagccaaccaagatgcaaatgttttgaaatgatatgaccaaaattttaagtaggaaagtcacccaaacacttctgctttcacttaagtgtctggcccgcaatactgtaggaacaagcatgatcttgttactgtgatattttaaatatccacagtactcactttttccaaatgatcctagtaattgcctagaaatatctttctcttacctgttatttatcaatttttcccagtatttttatacggaaaaaattgtattgaaaacacttagtatgcagttgataagaggaatttggtataattatggtgggtgattattttttatactgtatgtgccaaagctttactactgtggaaagacaactgttttaataaaagatttacattccaca

SEQ ID NO: 43 - DNA, 5084 bp, Homo sapiens
agcaccacggcagcaggaggtttcggctaagttggaggtactggccacgactgcatgcccgcgcccgccaggtgatacctccgccggtgacccaggggctctgcgacacaaggagtctgcatgtctaagtgctagacatgctcagctttgtggatacgcggactttgttgctgcttgcagtaaccttatgcctagcaacatgccaatctttacaagaggaaactgtaagaaagggcccagccggagatagaggaccacgtggagaaaggggtccaccaggccccccaggcagagatggtgaagatggtcccacaggccctcctggtccacctggtcctcctggcccccctggtctcggtgggaactttgctgctcagtatgatggaaaaggagttggacttggccctggaccaatgggcttaatgggacctagaggcccacctggtgcagctggagccccaggccctcaaggtttccaaggacctgctggtgagcctggtgaacctggtcaaactggtcctgcaggtgctcgtggtccagctggccctcctggcaaggctggtgaagatggtcaccctggaaaacccggacgacctggtgagagaggagttgttggaccacagggtgctcgtggtttccctggaactcctggacttcctggcttcaaaggcattaggggacacaatggtctggatggattgaagggacagcccggtgctcctggtgtgaagggtgaacctggtgcccctggtgaaaatggaactccaggtcaaacaggagcccgtgggcttcctggtgagagaggacgtgttggtgcccctggcccagctggtgcccgtggcagtgatggaagtgtgggtcccgtgggtcctgctggtcccattgggtctgctggccctccaggcttcccaggtgcccctggccccaagggtgaaattggagctgttggtaacgctggtcctgctggtcccgccggtccccgtggtgaagtgggtcttccaggcctctccggccccgttggacctcctggtaatcctggagcaaacggccttactggtgccaagggtgctgctggccttcccggcgttgctggggctcccggcctccctggaccccgcggtattcctggccctgttggtgctgccggtgctactggtgccagaggacttgttggtgagcctggtccagctggctccaaaggagagagcggtaacaagggtgagcccggctctgctgggccccaaggtcctcctggtcccagtggtgaagaaggaaagagaggccctaatggggaagctggatctgccggccctccaggacctcctgggctgagaggtagtcctggttctcgtggtcttcctggagctgatggcagagctggcgtcatgggccctcctggtagtcgtggtgcaagtggccctgctggagtccgaggacctaatggagatgctggtcgccctggggagcctggtctcatgggacccagaggtcttcctggttcccctggaaatatcggccccgctggaaaagaaggtcctgtcggcctccctggcatcgacggcaggcctggcccaattggcccagctggagcaagaggagagcctggcaacattggattccctggacccaaaggccccactggtgatcctggcaaaaacggtgataaaggtcatgctggtcttgctggtgctcggggtgctccaggtcctgatggaaacaatggtgctcagggacctcctggaccacagggtgttcaaggtggaaaaggtgaacagggtcccgctggtcctccaggcttccagggtctgcctggcccctcaggtcccgctggtgaagttggcaaaccaggagaaaggggtctccatggtgagtttggtctccctggtcctgctggtccaagaggggaacgcggtcccccaggtgagagtggtgctgccggtcctactggtcctattggaagccgaggtccttctggacccccagggcctgatggaaacaagggtgaacctggtgtggttggtgctgtgggcactgctggtccatctggtcctagtggactcccaggagagaggggtgctgctggcatacctggaggcaagggagaaaagggtgaacctggtctcagaggtgaaattggtaaccctggcagagatggtgctcgtggtgctcatggtgctgtaggtgcccctggtcctgctggagccacaggtgaccggggcgaagctggggctgctggtcctgctggtcctgctggtcctcggggaagccctggtgaacgtggcgaggtcggtcctgctggccccaacggatttgctggtccggctggtgctgctggtcaaccgggtgctaaaggagaaagaggagccaaagggcctaagggtgaaaacggtgttgttggtcccacaggccccgttggagctgctggcccagctggtccaaatggtccccccggtcctgctggaagtcgtggtgatggaggcccccctggtatgactggtttccctggtgctgctggacggactggtcccccaggaccctctggtatttctggccctcctggtccccctggtcctgctgggaaagaagggcttcgtggtcctcgtggtgaccaaggtccagttggccgaactggagaagtaggtgcagttggtccccctggcttcgctggtgagaagggtccctctggagaggctggtactgctggacctcctggcactccaggtcctcagggtcttcttggtgctcctggtattctgggtctccctggctcgagaggtgaacgtggtctacctggtgttgctggtgctgtgggtgaacctggtcctcttggcattgccggccctcctggggcccgtggtcctcctggtgctgtgggtagtcctggagtcaacggtgctcctggtgaagctggtcgtgatggcaaccctgggaacgatggtcccccaggtcgcgatggtcaacccggacacaagggagagcgcggttaccctggcaatattggtcccgttggtgctgcaggtgcacctggtcctcatggccccgtgggtcctgctggcaaacatggaaaccgtggtgaaactggtccttctggtcctgttggtcctgctggtgctgttggcccaagaggtcctagtggcccacaaggcattcgtggcgataagggagagcccggtgaaaaggggcccagaggtcttcctggcttaaagggacacaatggattgcaaggtctgcctggtatcgctggtcaccatggtgatcaaggtgctcctggctccgtgggtcctgctggtcctaggggccctgctggtccttctggccctgctggaaaagatggtcgcactggacatcctggtacggttggacctgctggcattcgaggccctcagggtcaccaaggccctgctggcccccctggtccccctggccctcctggacctccaggtgtaagcggtggtggttatgactttggttacgatggagacttctacagggctgaccagcctcgctcagcaccttctctcagacccaaggactatgaagttgatgctactctgaagtctctcaacaaccagattgagacccttcttactcctgaaggctctagaaagaacccagctcgcacatgccgtgacttgagactcagccacccagagtggagcagtggttactactggattgaccctaaccaaggatgcactatggatgctatcaaagtatactgtgatttctctactggcgaaacctgtatccgggcccaacctgaaaacatcccagccaagaactggtataggagctccaaggacaagaaacacgtctggctaggagaaactatcaatgctggcagccagtttgaatataatgtagaaggagtgacttccaaggaaatggctacccaacttgccttcatgcgcctgctggccaactatgcctctcagaacatcacctaccactgcaagaacagcattgcatacatggatgaggagactggcaacctgaaaaaggctgtcattctacagggctctaatgatgttgaacttgttgctgagggcaacagcaggttcacttacactgttcttgtagatggctgctctaaaaagacaaatgaatggggaaagacaatcattgaatacaaaacaaataagccatcacgcctgcccttccttgatattgcacctttggacatcggtggtgctgaccatgaattctttgtggacattggcccagtctgtttcaaataaatgaactcaatctaaattaaaaaagaaagaaatttgaaaaaactttctctttgccatttcttcttcttcttttttaactgaaagctgaatccttccatttcttctgcacatctacttgcttaaattgtgggcaaaagagaaaaagaaggattgatcagagcattgtgcaatacagtttcattaactccttcccccgctcccccaaaaatttgaatttttttttcaacactcttacacctgttatggaaaatgtcaacctttgtaagaaaaccaaaataaaaattgaaaaataaaaaccataaacatttgcaccacttgtggcttttgaatatcttccacagagggaagtttaaaacccaaacttccaaaggtttaaactacctcaaaacactttcccatgagtgtgatccacattgttaggtgctgacctagacagagatgaactgaggtccttgttttgttttgttcataatacaaaggtgctaattaatagtatttcagatacttgaagaatgttgatggtgctagaagaatttgagaagaaatactcctgtattgagttgtatcgtgtggtgtattttttaaaaaatttgatttagcattcatattttccatcttattcccaattaaaagtatgcagattatttgcccaaagttgtcctcttcttcagattcagcatttgttctttgccagtctcattttcatcttcttccatggttccacagaagctttgtttcttgggcaagcagaaaaattaaattgtacctattttgtatatgtgagatgtttaaataaattgtgaaaaaaatgaaataaagcatgtttggttttccaaaagaacatat

SEQ ID NO: 44 - DNA, 595 bp, Homo sapiens
gggcaaggctgggccgggaagggcgtgggttgaggagaggctccagacccgcacgccgcgcgcacagagctctcagcgccgctcccagccacagcctcccgcgcctcgctcagctccaacatggcaaaaatctccagccctacagagactgagcggtgcatcgagtccctgattgctgtcttccagaagtatgctggaaaggatggttataactacactctctccaagacagagttcctaagcttcatgaatacagaactagctgccttcacaaagaaccagaaggaccctggtgtccttgaccgcatgatgaagaaactggacaccaacagtgatggtcagctagatttctcagaatttcttaatctgattggtggcctagctatggcttgccatgactccttcctcaaggctgtcccttcccagaagcggacctgaggaccccttggccctggccttcaaacccaccccctttccttccagcctttctgtcatcatctccacagcccacccatcccctgagcacactaaccacctcatgcaggccccacctgccaatagtaataaagcaatgtcacttttttaaaacatgaaa

SEQ ID NO: 45 - DNA, 647 bp, Homo sapiens
gctcactgagcaccgtcccagcatccggacaccacagcggcccttcgctccacgcagaaaaccacacttctcataccttcactcaacacttccttccccaaagccagaagatgcacaaggaggaacatgaggtggctgtgctgggggcaccccccagcaccatccttccaaggtccaccgtgattaacatccacagcgagacctccgtgcccgaccatgtcgtctggtccctgttcaacaccctcttcttgaactggtgctgtctgggcttcatagcattcgcctactccgtaaagtctagggacaggaagatggttggcgacgtgaccggggcccaggcctatgcctccaccgccaagtgcctgaacatctgggccctgattctgggcatcctcatgaccattggattcatcctgttactggtattcggctctgtaacagtctaccatattatgttacagataatacaggaaaaacggggttactagtagccgcccatagcctgcaacctttgcactccactgtgcaatgctggccctgcacgctggggctgttgcccctgcccccttggtcctgcccctagatacagcagtttatacccacacacctgtctacagtgtcattcaataaagtgcacgtgcttgtga

SEQ ID NO: 46 - DNA, 2067 bp, Homo sapiens
cgctttttttttttttttttatgaataaattgtatgtgtttctagctgaaactactcaccaatatgcatgttaaattcaatcctctcttacctattctttgatataactccttgaagttttcccattctcctacatcatctcccccacccccactgagtcatttctataatacaaacatattatctttttattaaattaaaaatctacctgtacaccttgaatgacaatgctcggagctcccctgtggtcatcgacgcctccactgccattgatgcaccatccaacctgcgtttcctggccaccacacccaattccttgctggtatcatggcagccgccacgtgccaggattaccggctacatcatcaagtatgagaagcctgggtctcctcccagagaagtggtccctcggccccgccctggtgtcacagaggctactattactggcctggaaccgggaaccgaatatacaatttatgtcattgccctgaagaataatcagaagagcgagcccctgattggaaggaaaaagacaggacaagaagctctctctcagacaaccatctcatgggccccattccaggacacttctgagtacatcatttcatgtcatcctgttggcactgatgaagaacccttacagttcagggttcctggaacttctaccagtgccactctgacaggcctcaccagaggtgccacctacaacatcatagtggaggcactgaaagaccagcagaggcataaggttcgggaagaggttgttaccgtgggcaactctgtcaacgaaggcttgaaccaacctacggatgactcgtgctttgacccctacacagtttcccattatgccgttggagatgagtgggaacgaatgtctgaatcaggctttaaactgttgtgccagtgcttaggctttggaagtggtcatttcagatgtgattcatctagatggtgccatgacaatggtgtgaactacaagattggagagaagtgggaccgtcagggagaaaatggccagatgatgagctgcacatgtcttgggaacggaaaaggagaattcaagtgtgaccctcatgaggcaacgtgttatgatgatgggaagacataccacgtaggagaacagtggcagaaggaatatctcggtgccatttgctcctgcacatgctttggaggccagcggggctggcgctgtgacaactgccgcagacctgggggtgaacccagtcccgaaggcactactggccagtcctacaaccagtattctcagagataccatcagagaacaaacactaatgttaattgcccaattgagtgcttcatgcctttagatgtacaggctgacagagaagattcccgagagtaaatcatctttccaatccagaggaacaagcatgtctctctgccaagatccatctaaactggagtgatgttagcagacccagcttagagttcttctttctttcttaagccctttgctctggaggaagttctccagcttcagctcaactcacagcttctccaagcatcaccctgggagtttcctgagggttttctcataaatgagggctgcacattgcctgttctgcttcgaagtattcaataccgctcagtattttaaatgaagtgattctaagatttggtttgggatcaataggaaagcatatgcagccaaccaagatgcaaatgttttgaaatgatatgaccaaaattttaagtaggaaagtcacccaaacacttctgctttcacttaagtgtctggcccgcaatactgtaggaacaagcatgatcttgttactgtgatattttaaatatccacagtactcactttttccaaatgatcctagtaattgcctagaaatatctttctcttacctgttatttatcaatttttcccagtatttttatacggaaaaaattgtattgaaaacacttagtatgcagttgataagaggaatttggtataattatggtgggtgattattttttatactgtatgtgccaaagctttactactgtggaaagacaactgttttaataaaagatttacattccaaaaaaaaaaaaaaa

SEQ ID NO: 47 - DNA, 5489 bp, Homo sapiens
ggctgagttttatgacgggcccggtgctgaagggcagggaacaacttgatggtgctactttgaactgcttttcttttctcctttttgcacaaagagtctcatgtctgatatttagacatgatgagctttgtgcaaaaggggagctggctacttctcgctctgcttcatcccactattattttggcacaacaggaagctgttgaaggaggatgttcccatcttggtcagtcctatgcggatagagatgtctggaagccagaaccatgccaaatatgtgtctgtgactcaggatccgttctctgcgatgacataatatgtgacgatcaagaattagactgccccaacccagaaattccatttggagaatgttgtgcagtttgcccacagcctccaactgctcctactcgccctcctaatggtcaaggacctcaaggccccaagggagatccaggccctcctggtattcctgggagaaatggtgaccctggtattccaggacaaccagggtcccctggttctcctggcccccctggaatctgtgaatcatgccctactggtcctcagaactattctccccagtatgattcatatgatgtcaagtctggagtagcagtaggaggactcgcaggctatcctggaccagctggccccccaggccctcccggtccccctggtacatctggtcatcctggttcccctggatctccaggataccaaggaccccctggtgaacctgggcaagctggtccttcaggccctccaggacctcctggtgctataggtccatctggtcctgctggaaaagatggagaatcaggtagacccggacgacctggagagcgaggattgcctggacctccaggtatcaaaggtccagctgggatacctggattccctggtatgaaaggacacagaggcttcgatggacgaaatggagaaaagggtgaaacaggtgctcctggattaaagggtgaaaatggtcttccaggcgaaaatggagctcctggacccatgggtccaagaggggctcctggtgagcgaggacggccaggacttcctggggctgcaggtgctcggggtaatgacggtgctcgaggcagtgatggtcaaccaggccctcctggtcctcctggaactgccggattccctggatcccctggtgctaagggtgaagttggacctgcagggtctcctggttcaaatggtgcccctggacaaagaggagaacctggacctcagggacacgctggtgctcaaggtcctcctggccctcctgggattaatggtagtcctggtggtaaaggcgaaatgggtcccgctggcattcctggagctcctggactgatgggagcccggggtcctccaggaccagccggtgctaatggtgctcctggactgcgaggtggtgcaggtgagcctggtaagaatggtgccaaaggagagcccggaccacgtggtgaacgcggtgaggctggtattccaggtgttccaggagctaaaggcgaagatggcaaggatggatcacctggagaacctggtgcaaatgggcttccaggagctgcaggagaaaggggtgcccctgggttccgaggacctgctggaccaaatggcatcccaggagaaaagggtcctgctggagagcgtggtgctccaggccctgcagggcccagaggagctgctggagaacctggcagagatggcgtccctggaggtccaggaatgaggggcatgcccggaagtccaggaggaccaggaagtgatgggaaaccagggcctcccggaagtcaaggagaaagtggtcgaccaggtcctcctgggccatctggtccccgaggtcagcctggtgtcatgggcttccccggtcctaaaggaaatgatggtgctcctggtaagaatggagaacgaggtggccctggaggacctggccctcagggtcctcctggaaagaatggtgaaactggacctcaaggacccccagggcctactgggcctggtggtgacaaaggagacacaggaccccctggtccacaaggattacaaggcttgcctggtacaggtggtcctccaggagaaaatggaaaacctggggaaccaggtccaaagggtgatgccggtgcacctggagctccaggaggcaagggtgatgctggtgcccctggtgaacgtggacctcctggattggcaggggccccaggacttagaggtggagctggtccccctggtcccgaaggaggaaagggtgctgctggtcctcctgggccacctggtgctgctggtactcctggtctgcaaggaatgcctggagaaagaggaggtcttggaagtcctggtccaaagggtgacaagggtgaaccaggcggcccaggtgctgatggtgtcccagggaaagatggcccaaggggtcctactggtcctattggtcctcctggcccagctggccagcctggagataagggtgaaggtggtgcccccggacttccaggtatagctggacctcgtggtagccctggtgagagaggtgaaactggccctccaggacctgctggtttccctggtgctcctggacagaatggtgaacctggtggtaaaggagaaagaggggctccgggtgagaaaggtgaaggaggccctcctggagttgcaggaccccctggaggttctggacctgctggtcctcctggtccccaaggtgtcaaaggtgaacgtggcagtcctggtggacctggtgctgctggcttccctggtgctcgtggtcttcctggtcctcctggtagtaatggtaacccaggacccccaggtcccagcggttctccaggcaaggatgggcccccaggtcctgcgggtaacactggtgctcctggcagccctggagtgtctggaccaaaaggtgatgctggccaaccaggagagaagggatcgcctggtgcccagggcccaccaggagctccaggcccacttgggattgctgggatcactggagcacggggtcttgcaggaccaccaggcatgccaggtcctaggggaagccctggccctcagggtgtcaagggtgaaagtgggaaaccaggagctaacggtctcagtggagaacgtggtccccctggaccccagggtcttcctggtctggctggtacagctggtgaacctggaagagatggaaaccctggatcagatggtcttccaggccgagatggatctcctggtggcaagggtgatcgtggtgaaaatggctctcctggtgcccctggcgctcctggtcatccaggcccacctggtcctgtcggtccagctggaaagagtggtgacagaggagaaagtggccctgctggccctgctggtgctcccggtcctgctggttcccgaggtgctcctggtcctcaaggcccacgtggtgacaaaggtgaaacaggtgaacgtggagctgctggcatcaaaggacatcgaggattccctggtaatccaggtgccccaggttctccaggccctgctggtcagcagggtgcaatcggcagtccaggacctgcaggccccagaggacctgttggacccagtggacctcctggcaaagatggaaccagtggacatccaggtcccattggaccaccagggcctcgaggtaacagaggtgaaagaggatctgagggctccccaggccacccagggcaaccaggccctcctggacctcctggtgcccctggtccttgctgtggtggtgttggagccgctgccattgctgggattggaggtgaaaaagctggcggttttgccccgtattatggagatgaaccaatggatttcaaaatcaacaccgatgagattatgacttcactcaagtctgttaatggacaaatagaaagcctcattagtcctgatggttctcgtaaaaaccccgctagaaactgcagagacctgaaattctgccatcctgaactcaagagtggagaatactgggttgaccctaaccaaggatgcaaattggatgctatcaaggtattctgtaatatggaaactggggaaacatgcataagtgccaatcctttgaatgttccacggaaacactggtggacagattctagtgctgagaagaaacacgtttggtttggagagtccatggatggtggttttcagtttagctacggcaatcctgaacttcctgaagatgtccttgatgtgcagctggcattccttcgacttctctccagccgagcttcccagaacatcacatatcactgcaaaaatagcattgcatacatggatcaggccagtggaaatgtaaagaaggccctgaagctgatggggtcaaatgaaggtgaattcaaggctgaaggaaatagcaaattcacctacacagttctggaggatggttgcacgaaacacactggggaatggagcaaaacagtctttgaatatcgaacacgcaaggctgtgagactacctattgtagatattgcaccctatgacattggtggtcctgatcaagaatttggtgtggacgttggccctgtttgctttttataaaccaaactctatctgaaatcccaacaaaaaaaatttaactccatatgtgttcctcttgttctaatcttgtcaaccagtgcaagtgaccgacaaaattccagttatttatttccaaaatgtttggaaacagtataatttgacaaagaaaaatgatacttctctttttttgctgttccaccaaatacaattcaaatgctttttgttttatttttttaccaattccaatttcaaaatgtctcaatggtgctataataaataaacttcaacactctttatgataacaacactgtgttatattctttgaatcctagcccatctgcagagcaatgactgtgctcaccagtaaaagataacctttctttctgaaatagtcaaatacgaaattagaaaagccctccctattttaactacctcaactggtcagaaacacagattgtattctatgagtcccagaagatgaaaaaaattttatacgttgataaaacttataaatttcattgattaatctcctggaagattggtttaaaaagaaaagtgtaatgcaagaatttaaagaaatatttttaaagccacaattattttaatattggatatcaactgcttgtaaaggtgctcctcttttttcttgtcattgctggtcaagattactaatatttgggaaggctttaaagacgcatgttatggtgctaatgtactttcacttttaaactctagatcagaattgttgacttgcattcagaacataaatgcacaaaatctgtacatgtctcccatcagaaagattcattggcatgccacagggattctcctccttcatcctgtaaaggtcaacaataaaaaccaaattatggggctgcttttgtcacactagcatagagaatgtgttgaaatttaactttgtaagcttgtatgtggttgttgatcttttttttccttacagacacccataataaaatatcatattaaaattc

SEQ ID NO: 48 - DNA, 1128 bp, Homo sapiens
acagagcttaggacacagagcacatcaaaagttcccaaagagggcttgctctctcttcacctgctctgttctacagcacactaccagaagacagcagaaatgaaaagcatttactttgtggctggattatttgtaatgctggtacaaggcagctggcaacgttcccttcaagacacagaggagaaatccagatcattctcagcttcccaggcagacccactcagtgatcctgatcagatgaacgaggacaagcgccattcacagggcacattcaccagtgactacagcaagtatctggactccaggcgtgcccaagattttgtgcagtggttgatgaataccaagaggaacaggaataacattgccaaacgtcacgatgaatttgagagacatgctgaagggacctttaccagtgatgtaagttcttatttggaaggccaagctgccaaggaattcattgcttggctggtgaaaggccgaggaaggcgagatttcccagaagaggtcgccattgttgaagaacttggccgcagacatgctgatggttctttctctgatgagatgaacaccattcttgataatcttgccgccagggactttataaactggttgattcagaccaaaatcactgacaggaaataactatatcactattcaagatcatcttcacaacatcacctgctagccacgtgggatgtttgaaatgttaagtcctgtaaatttaagaggtgtattctgaggccacattgctttgcatgccaataaataaattttcttttagtgttgtgtagccaaaaattacaaatggaataaagttttatcaaaatattgctaaaatatcagctttaaaatatgaaagtgctagattctgttattttcttcttattttggatgaagtaccccaacctgtttacatttagcgataaaattatttttctatgatataatttgtaaatgtaaattattccgatctgacatatctgcattataataataggagaatagaagaactggtagccacagtggtgaaattggaaagagaactttcttcctgaaacctttgtcttaaaaatactcagctttcaatgtatcaaagatacaattaaataaaattttcaagcttcttta

SEQ ID NO: 49 - DNA, 3528 bp, Homo sapiens
tatgcatggagtggacctgtaggcgacttgcatcgtcttcaacatgaagatagccacagtgtcagtgcttctgcccttggctctttgcctcatacaagatgctgccagtaagaatgaagatcaggaaatgtgccatgaatttcaggcatttatgaaaaatggaaaactgttctgtccccaggataagaaattttttcaaagtcttgatggaataatgttcatcaataaatgtgccacgtgcaaaatgatactggaaaaagaagcaaaatcacagaagagggccaggcatttagcaagagctcccaaggctactgccccaacagagctgaattgtgatgattttaaaaaaggagaaagagatggggattttatctgtcctgattattatgaagctgtttgtggcacagatgggaaaacatatgacaacagatgtgcactgtgtgctgagaatgcgaaaaccgggtcccaaattggtgtaaaaagtgaaggggaatgtaagagcagtaatccagagcaggatgtatgcagtgcttttcggccctttgttagagatggaagacttggatgcacaagggaaaatgatcctgttcttggtcctgatgggaagacgcatggcaataagtgtgcaatgtgtgctgagctgtttttaaaagaagctgaaaatgccaagcgagagggtgaaactagaattcgacgaaatgctgaaaaggatttttgcaaggaatatgaaaaacaagtgagaaatggaaggcttttttgtacacgggagagtgatccagtccgtggccctgacggcaggatgcatggcaacaaatgtgccctgtgtgctgaaattttcaagcggcgtttttcagaggaaaacagtaaaacagatcaaaatttgggaaaagctgaagaaaaaactaaagttaaaagagaaattgtgaaactctgcagtcaatatcaaaatcaggcaaagaatggaatacttttctgtaccagagaaaatgaccctattcgtggtccagatgggaaaatgcatggcaacttgtgttccatgtgtcaagtctacttccaagcagaaaatgaagaaaagaaaaaggctgaagcacgagctagaaacaaaagagaatctggaaaagcaacctcatatgcagagctttgcaatgaatatcgaaagcttgtgaggaacggaaaacttgcttgcaccagagagaacgatcctatccagggcccagatgggaaagtgcacggcaacacctgctccatgtgtgaggtcttcttccaagcagaagaagaagaaaagaaaaagaaggaaggcgaatcaagaaacaaaagacaatctaagagtacagcttcctttgaggagttgtgtagtgaataccgcaaatccaggaaaaacggacggcttttttgcaccagagagaatgaccccatccagggcccagatgggaaaatgcatggcaacacctgctccatgtgtgaggccttctttcaacaagaagaaagagcaagagcaaaggctaaaagagaagctgcaaaggaaatctgcagtgaatttcgggaccaagtgaggaatggaacacttatatgcaccagggagcataatcctgtccgtggaccagatggcaaaatgcatggaaacaagtgtgccatgtgtgccagtgtgttcaaacttgaagaagaagagaagaaaaatgataaagaagaaaaagggaaagttgaggctgaaaaagttaagagagaagcagttcaggagctgtgcagtgaatatcgtcattatgtgaggaatggacgactcccctgtaccagagagaatgatcctattgagggtctagatgggaaaatccacggcaacacctgctccatgtgtgaagccttcttccagcaagaagcaaaagaaaaagaaagagctgaacccagagcaaaagtcaaaagagaagctgaaaaggagacatgcgatgaatttcggagacttttgcaaaatggaaaacttttctgcacaagagaaaatgatcctgtgcgtggcccagatggcaagacccatggcaacaagtgtgccatgtgtaaggcagtcttccagaaagaaaatgaggaaagaaagaggaaagaagaggaagatcagagaaatgctgcaggacatggttccagtggtggtggaggaggaaacactcaggacgaatgtgctgagtatcaggaacaaatgaaaaatggaagactcagctgtactcgggagagtgatcctgtacgtgatgctgatggcaaatcgtacaacaatcagtgtaccatgtgtaaagcaaaattggaaagagaagcagagagaaaaaatgagtattctcgctccagatcaaatgggactggatcagaatcagggaaggatacatgtgatgagtttagaagccaaatgaaaaatggaaaacttatctgcactcgagaaagtgaccctgtccggggtccagatggcaagacacatggtaataagtgtactatgtgtaaggaaaaactggaaagggaagcagctgaaaaaaaaaagaaagaggatgaagacaggagcaatacaggagaaaggagcaatacaggagaaaggagcaatgacaaagaggatctgtgtcgtgaatttcgaagcatgcagagaaatggaaagcttatctgcaccagagaaaataaccctgttcgaggcccatatggcaagatgcacatcaataaatgtgctatgtgtcagagcatctttgatcgagaagctaatgaaagaaaaaagaaagatgaagagaaatcaagtagcaagccctcaaataatgcaaaggatgagtgcagtgaatttcgaaactatataaggaacaatgaactcatctgccctagagagaatgacccagtgcacggtgctgatggaaagttctatacaaacaagtgctacatgtgcagagctgtctttctaacagaagctttggaaagggcaaagcttcaagaaaagccatcccatgttagagcttctcaagaggaagacagcccagactctttcagttctctggattctgagatgtgcaaagactaccgagtattgcccaggataggctatctttgtccaaaggatttaaagcctgtctgtggtgacgatggccaaacctacaacaatccttgcatgctctgtcatgaaaacctgatacgccaaacaaatacacacatccgcagtacagggaagtgtgaggagagcagcaccccaggaaccaccgcagccagcatgcccccgtctgacgaatgacaggaagattgttgaaagccatgagggaaaaaataaaccccagttctgaatcacctaccttcaccatctgtatatacaaagaattcttcggagcttgtcttatttgctatagaaaacaatacagagcttttgggaatggaatcactgattttcagtcttttccatttctttcctcctagaatctgtgatctgagggtataaagacatttccaccaagtttgagccctcaaaatgtcctgattacaatgctgtctgtccaactgcctgttcaataaaagtaaactcagcag

SEQ ID NO: 50 - DNA, 3494 bp, Homo sapiens
taatttttgcccagtctgcctgttgtggggctcctcccctttggggatataagcccggcctggggctgctccgttctctgcctggcctgaggctccctgagccgcctccccaccatcaccatggccaagggcttctatatttccaagtccctgggcatcctggggatcctcctgggcgtggcagccgtgtgcacaatcatcgcactgtcagtggtgtactcccaggagaagaacaagaacgccaacagctcccccgtggcctccaccaccccgtccgcctcagccaccaccaaccccgcctcggccaccaccttggaccaaagtaaagcgtggaatcgttaccgcctccccaacacgctgaaacccgattcctaccaggtgacgctgagaccgtacctcacccccaatgacaggggcctgtacgtttttaagggctccagcaccgtccgtttcacctgcaaggaggccactgacgtcatcatcatccacagcaagaagctcaactacaccctcagccaggggcacagggtggtcctgcgtggtgtgggaggctcccagccccccgacattgacaagactgagctggtggagcccaccgagtacctggtggtgcacctcaagggctccctggtgaaggacagccagtatgagatggacagcgagttcgagggggagttggcagatgacctggcgggcttctaccgcagcgagtacatggagggcaatgtcagaaaggtggtggccactacacagatgcaggctgcagatgcccggaagtccttcccatgcttcgatgagccggccatgaaggccgagttcaacatcacgcttatccaccccaaggacctgacagccctgtccaacatgcttcccaaaggtcccagcaccccacttccagaagaccccaactggaatgtcactgagttccacaccacgcccaagatgtccacgtacttgctggccttcattgtcagtgagttcgactacgtggagaagcaggcatccaatggtgtcttgatccggatctgggcccggcccagtgccattgcggcgggccacggcgattatgccctgaacgtgacgggccccatccttaacttctttgctggtcattatgacacaccctacccactcccaaaatcagaccagattggcctgccagacttcaacgccggcgccatggagaactggggactggtgacctaccgggagaactccctgctgttcgaccccctgtcctcctccagcagcaacaaggagcgggtggtcactgtgattgctcatgagctggcccaccagtggttcgggaacctggtgaccatagagtggtggaatgacctgtggctgaacgagggcttcgcctcctacgtggagtacctgggtgctgactatgcggagcccacctggaacttgaaagacctcatggtgctgaatgatgtgtaccgcgtgatggcagtggatgcactggcctcctcccacccgctgtccacacccgcctcggagatcaacacgccggcccagatcagtgagctgtttgacgccatctcctacagcaagggcgcctcagtcctcaggatgctctccagcttcctgtccgaggacgtattcaagcagggcctggcgtcctacctccacacctttgcctaccagaacaccatctacctgaacctgtgggaccacctgcaggaggctgtgaacaaccggtccatccaactccccaccaccgtgcgggacatcatgaaccgctggaccctgcagatgggcttcccggtcatcacggtggataccagcacggggaccctttcccaggagcacttcctccttgaccccgattccaatgttacccgcccctcagaattcaactacgtgtggattgtgcccatcacatccatcagagatggcagacagcagcaggactactggctgatagatgtaagagcccagaacgatctcttcagcacatcaggcaatgagtgggtcctgctgaacctcaatgtgacgggctattaccgggtgaactacgacgaagagaactggaggaagattcagactcagctgcagagagaccactcggccatccctgtcatcaatcgggcacagatcattaatgacgccttcaacctggccagtgcccataaggtccctgtcactctggcgctgaacaacaccctcttcctgattgaagagagacagtacatgccctgggaggccgccctgagcagcctgagctacttcaagctcatgtttgaccgctccgaggtctatggccccatgaagaactacctgaagaagcaggtcacacccctcttcattcacttcagaaataataccaacaactggagggagatcccagaaaacctgatggaccagtacagcgaggttaatgccatcagcaccgcctgctccaacggagttccagagtgtgaggagatggtctctggccttttcaagcagtggatggagaaccccaataataacccgatccaccccaacctgcggtccaccgtctactgcaacgctatcgcccagggcggggaggaggagtgggacttcgcctgggagcagttccgaaatgccacactggtcaatgaggctgacaagctccgggcagccctggcctgcagcaaagagttgtggatcctgaacaggtacctgagctacaccctgaacccggacttaatccggaagcaggacgccacctctaccatcatcagcattaccaacaacgtcattgggcaaggtctggtctgggactttgtccagagcaactggaagaagctttttaacgattatggtggtggctcgttctccttctccaacctcatccaggcagtgacacgacgattctccaccgagtatgagctgcagcagctggagcagttcaagaaggacaacgaggaaacaggcttcggctcaggcacccgggccctggagcaagccctggagaagacgaaagccaacatcaagtgggtgaaggagaacaaggaggtggtgctccagtggttcacagaaaacagcaaatagtccccagcccttgaagtcacccggccccgatgcaaggtgcccacatgtgtccatcccagcggctggtgcagggcctccattcctggagcccgaggcaccagtgtcctcccctcaaggacaaagtctccagcccacgttctctctgcctgtgagccagtctagttcctgatgacccaggctgcctgagcacctcccagcccctgcccctcatgccaaccccgccctaggcctggcatggcacctgtcgcccagtgccctggggctgatctcagggaagcccagctccagggccagatgagcagaagctctcgatggacaatgaacggccttgctgggggccgccctgtaccctctttcacctttccctaaagaccctaaatctgaggaatcaacagggcagcagatctgtatatttttttctaagagaaaatgtaaataaaggatttctagatgaaaaaaaaaaaaaaaaa

SEQ ID NO: 51 - DNA, 1309 bp, Homo sapiens
taggagataagagtatcttgcacagcaggtgcaggtttcccagcagctcaggcaagagtccgatgtttgtgccatctgatcctgatgtctggagagatagccatgtgtgagcctgaatttggcaatgacaaggccagggagccgagcgtgggtggcaggtggcgagtgtcctggtacgaacggtttgtgcagccatgtctggtcgaactgctgggctctgctctcttcatcttcatcgggtgcctgtcggtcattgagaatgggacggacactgggctgctgcagccggccctggcccacgggctggctttggggctcgtgattgccacgctggggaatatcagtggtggacacttcaaccctgcggtgtccctggcagccatgctgatcggaggcctcaacctggtgatgctcctcccgtactgggtctcacagctgctcggggggatgctcggggctgccttggccaaggtggtgagtcctgaggagaggttctggaatgcatctggggcggcctttgtgacagtccaggagcaggggcaggtggcaggggcgttggtggcagagatcatcctgacgacgctgctggccctggctgtatgcatgggtgccatcaatgagaagacaaagggccctctggccccgttctccatcggctttgccgtcaccgtggatatcctggctgggggccctgtgtctggaggctgcatgaatcccgcccgtgcttttggacctgcggtggtggccaaccactggaacttccactggatctactggctgggcccactcctggctggcctgcttgttggactgctcattaggtgcttcattggagatgggaagacccgcctcatcctgaaggctcggtgagcagagctcgtgggattcctgctgctccaggtgtcctcagctcacctgtcccagactgaggacaggggagttcctgcatttcctgccagggcagaggcccagaggagcgaccccctgcttccactgcttgggcctgctttctcagatagactgactgctgaggaggctctaggttcttggaattcctttgtgctcatcagagaccccagcctggggaacacgctgcccgcactgcccagagagcagtgcaaacaccacaacacgagcgtgtttcttgagaggaatgtccccgagttggacaaggaggctgtttctgcacatcagctcatttcccgcaccccatttcttgcttgattgctttgttgggggcctggccacttccttgcttctcaagctgacaattctcactttgcaataaatagtccagtgtttccttcat

SEQ ID NO: 52 - DNA, 596 bp, Homo sapiens
gacagcgcagggggaacccagggagcgcgatgggctgcagggctgcgtcagggctcctgccaggagtggccgtggtcctcctgctgctgctgcagagcacacagtcagtctacatccagtaccaaggcttccgggtccagctggaatccatgaagaagctgagtgacctggaggcacagtgggcacccagcccccgcctgcaggcccagagcctcctgcccgccgtgtgccaccaccctgctctgcctcaggaccttcagcctgtctgcgcctcgcaggaggcttccagcatcttcaagaccctgaggaccatcgctaacgacgactgtgagctgtgtgtgaacgttgcgtgtaccggctgcctctgagatagccctgggtaccctgagcccaccagggacacctcgcccttcagcccaccaccctggcaggcttccatccccgtccatgctcaagatgggtccctggccaccatggtcatcaccacccttccagggcctgagcagctggatctggtacaaagcaatcggacatagagttggagggggaggcccctgaggcagcccagctcctgaataaagattctacaacacacg

SEQ ID NO: 53 - DNA, 3218 bp, Homo sapiens
gaacaaaccaacatttgagccaggaataactagagaggaacaatggggttattcagaggttttgttttcctcttagttctgtgcctgctgcaccagtcaaatacttccttcattaagctgaataataatggctttgaagatattgtcattgttatagatcctagtgtgccagaagatgaaaaaataattgaacaaatagaggatatggtgactacagcttctacgtacctgtttgaagccacagaaaaaagattttttttcaaaaatgtatctatattaattcctgagaattggaaggaaaatcctcagtacaaaaggccaaaacatgaaaaccataaacatgctgatgttatagttgcaccacctacactcccaggtagagatgaaccatacaccaagcagttcacagaatgtggagagaaaggcgaatacattcacttcacccctgaccttctacttggaaaaaaacaaaatgaatatggaccaccaggcaaactgtttgtccatgagtgggctcacctccggtggggagtgtttgatgagtacaatgaagatcagcctttctaccgtgctaagtcaaaaaaaatcgaagcaacaaggtgttccgcaggtatctctggtagaaatagagtttataagtgtcaaggaggcagctgtcttagtagagcatgcagaattgattctacaacaaaactgtatggaaaagattgtcaattctttcctgataaagtacaaacagaaaaagcatccataatgtttatgcaaagtattgattctgttgttgaattttgtaacgaaaaaacccataatcaagaagctccaagcctacaaaacataaagtgcaattttagaagtacatgggaggtgattagcaattctgaggattttaaaaacaccatacccatggtgacaccacctcctccacctgtcttctcattgctgaagatccgtcaaagaattgtgtgcttagttcttgataagtctggaagcatggggggtaaggaccgcctaaatcgaatgaatcaagcagcaaaacatttcctgctgcagactgttgaaaatggatcctgggtggggatggttcactttgatagtactgccactattgtaaataagctaatccaaataaaaagcagtgatgaaagaaacacactcatggcaggattacctacatatcctctgggaggaacttccatctgctctggaattaaatatgcatttcaggtgattggagagctacattcccaactcgatggatccgaagtactgctgctgactgatggggaggataacactgcaagttcttgtattgatgaagtgaaacaaagtggggccattgttcattttattgctttgggaagagctgctgatgaagcagtaatagagatgagcaagataacaggaggaagtcatttttatgtttcagatgaagctcagaacaatggcctcattgatgcttttggggctcttacatcaggaaatactgatctctcccagaagtcccttcagctcgaaagtaagggattaacactgaatagtaatgcctggatgaacgacactgtcataattgatagtacagtgggaaaggacacgttctttctcatcacatggaacagtctgcctcccagtatttctctctgggatcccagtggaacaataatggaaaatttcacagtggatgcaacttccaaaatggcctatctcagtattccaggaactgcaaaggtgggcacttgggcatacaatcttcaagccaaagcgaacccagaaacattaactattacagtaacttctcgagcagcaaattcttctgtgcctccaatcacagtgaatgctaaaatgaataaggacgtaaacagtttccccagcccaatgattgtttacgcagaaattctacaaggatatgtacctgttcttggagccaatgtgactgctttcattgaatcacagaatggacatacagaagttttggaacttttggataatggtgcaggcgctgattctttcaagaatgatggagtctactccaggtattttacagcatatacagaaaatggcagatatagcttaaaagttcgggctcatggaggagcaaacactgccaggctaaaattacggcctccactgaatagagccgcgtacataccaggctgggtagtgaacggggaaattgaagcaaacccgccaagacctgaaattgatgaggatactcagaccaccttggaggatttcagccgaacagcatccggaggtgcatttgtggtatcacaagtcccaagccttcccttgcctgaccaatacccaccaagtcaaatcacagaccttgatgccacagttcatgaggataagattattcttacatggacagcaccaggagataattttgatgttggaaaagttcaacgttatatcataagaataagtgcaagtattcttgatctaagagacagttttgatgatgctcttcaagtaaatactactgatctgtcaccaaaggaggccaactccaaggaaagctttgcatttaaaccagaaaatatctcagaagaaaatgcaacccacatatttattgccattaaaagtatagataaaagcaatttgacatcaaaagtatccaacattgcacaagtaactttgtttatccctcaagcaaatcctgatgacattgatcctactcctactcctactcctactcctgataaaagtcataattctggagttaatatttctacgctggtattgtctgtgattgggtctgttgtaattgttaactttattttaagtaccaccatttgaaccttaacgaagaaaaaaatcttcaagtagacctagaagagagttttaaaaaacaaaacaatgtaagtaaaggatatttctgaatcttaaaattcatcccatgtgtgatcataaactcataaaaataattttaagatgtcggaaaaggatactttgattaaataaaaacactcatggatatgtaaaaactgtcaagattaaaatttaatagtttcatttatttgttattttatttgtaagaaatagtgatgaacaaagatcctttttcatactgatacctggttgtatattatttgatgcaacagttttctgaaatgatatttcaaattgcatcaagaaattaaaatcatctatctgagtagtcaaaatacaagtaaaggagagcaaataaacaacatttggaaaaaaaaaaaaaaaaaaaa

SEQ ID NO: 54 - DNA, 1630 bp, Homo sapiens
aaaagcagaaagagattaccagccacagacgggtcatgagcgcggtattactgctggccctcctggggttcatcctcccactgccaggagtgcaggcgctgctctgccagtttgggacagttcagcatgtgtggaaggtgtccgacctgccccggcaatggacccctaagaacaccagctgcgacagcggcttggggtgccaggacacgttgatgctcattgagagcggaccccaagtgagcctggtgctctccaagggctgcacggaggccaaggaccaggagccccgcgtcactgagcaccggatgggccccggcctctccctgatctcctacaccttcgtgtgccgccaggaggacttctgcaacaacctcgttaactccctcccgctttgggccccacagcccccagcagacccaggatccttgaggtgcccagtctgcttgtctatggaaggctgtctggaggggacaacagaagagatctgccccaaggggaccacacactgttatgatggcctcctcaggctcaggggaggaggcatcttctccaatctgagagtccagggatgcatgccccagccaggttgcaacctgctcaatgggacacaggaaattgggcccgtgggtatgactgagaactgcaataggaaagattttctgacctgtcatcgggggaccaccattatgacacacggaaacttggctcaagaacccactgattggaccacatcgaataccgagatgtgcgaggtggggcaggtgtgtcaggagacgctgctgctcatagatgtaggactcacatcaaccctggtggggacaaaaggctgcagcactgttggggctcaaaattcccagaagaccaccatccactcagcccctcctggggtgcttgtggcctcctatacccacttctgctcctcggacctgtgcaatagtgccagcagcagcagcgttctgctgaactccctccctcctcaagctgcccctgtcccaggagaccggcagtgtcctacctgtgtgcagccccttggaacctgttcaagtggctccccccgaatgacctgccccaggggcgccactcattgttatgatgggtacattcatctctcaggaggtgggctgtccaccaaaatgagcattcagggctgcgtggcccaaccttccagcttcttgttgaaccacaccagacaaatcgggatcttctctgcgcgtgagaagcgtgatgtgcagcctcctgcctctcagcatgagggaggtggggctgagggcctggagtctctcacttggggggtggggctggcactggccccagcgctgtggtggggagtggtttgcccttcctgctaactctattacccccacgattcttcaccgctgctgaccacccacactcaacctccctctgacctcataacctaatggccttggacaccagattctttcccattctgtccatgaatcatcttccccacacacaatcattcatatctactcacctaacagcaacactggggagagcctggagcatccggacttgccctatgggagaggggacgctggaggartggctgcatgtatctgataatacagaccctgtcctttcaaaaaaaaaaaaaaaaaaaaaaaaa

SEQ ID NO: 55 - DNA, 2221 bp, Homo sapiens
gtgaccggaggcgagaaaccccgcctcggcaccctgacgcagcgcaggacccgccccgcgcgtgacgccagcgtcaggccagccccggcatgctctgcggccgcccgcggtccagctccgacaacaggaattttctccgagagcgggccgggctcagttcagctgctgtccagacccggatcggcaacagtgccgcctccagacgttctcctgccgctcgcccgcccgtcccagcgcccccagccctcccgcgagggcgccccgggacggaaggatccaccagtctgtcggcgcccgccgttctcgtggtcgccgtcgccgtcgtcgtggtggtagtctccgccgtcgcctgggccatggccaattacatccacgtccctcccggctccccggaggtgcccaagctgaacgtcaccgttcaggatcaggaggagcatcgctgccgggagggggccctgagcctcctgcaacacctgcggcctcactgggacccccaggaggtgaccctgcagctcttcacagatggaatcacaaataaacttattggctgttacgtgggaaacaccatggaggatgtagtcctggtgagaatttatggcaataagactgagttattagtcgatcgagatgaggaagtaaagagttttcgagtgttgcaggctcatgggtgtgcaccacaactctactgtaccttcaataatggactatgctatgaatttatacaaggagaagcactggatccaaagcatgtctgcaacccagccattttcaggctaatagctcgtcagcttgctaaaatccatgctattcatgcacacaatggctggatccccaaatctaatctttggctaaagatgggaaagtatttctctctcattcccacaggatttgcagatgaagacattaataaaaggttcctaagtgatatcccaagctctcagattctccaggaagagatgacttggatgaaggagattctttccaacctgggctcacctgttgtgctttgccataatgacctattgtgtaagaatataatctacaatgagaaacaaggtgatgtacagttcattgattatgaatattctggatacaactacctggcatatgatattggaaatcatttcaatgaatttgcaggtgtgagtgatgtagactatagtctgtatccagatagagaactacagagtcagtggctgcgtgcttaccttgaagcctacaaagaatttaagggctttgggactgaagttactgaaaaggaggtagaaatactcttcattcaagtcaatcagtttgcattggcttctcatttcttttggggattgtgggctttgattcaagccaaatactccactattgagtttgatttccttgggtatgcaattgttcgttttaaccagtactttaaaatgaagcctgaggttactgcattaaaagtgcctgagtaaagaagagatttaattattctccagtagctgagcaatgcttgtgaatcttttcttaagaaatcccaaaaagccaatattagttaaaattctgttgtttaatttggttatcttgctttataaattatgcctctaaacaatcaaatctatttttgaaatagactgaatgatgtcaagaaatatacctactgctatccgtatgtggtggattagaaatgtgttaaatctgcaaaaggtataaagatgtcagtttaatttctttgataatttaacctatgttgtatgtgaattatttattataaacttagcacgattctgtgactgtttttctctgtttcacgttcgttgagtgtaagcaatgaaaatgtcccaaataagttttttaagttttactttaataagattaatttcagtaaacattctagttgttcagtgtaacctttttatcttgatgcattgtaagtaaaatgaatcatttactcttgaaatgccagtcattgactgatgtagataatttaggattttcatataaaaatagctgtttaggaaggtgaaatacattcactgtctctgttggtggtacatcttgttgaattcaatattagaaagtatttctttttggggtaatataacttagaattaaatccctgtttctctatgtagtctggcagtataaatataaatatttaccatataatcttggaataagtattagttaatgttaccaaaatctgtattaaataatgttttcaaatgctaaaaaaaaaaaaaaaaaa

SEQ ID NO: 56 - DNA, 1306 bp, Homo sapiens
tgataagctacaacataaacacatctaggttcttgttcttagaatacagcatgaagaatttgctttcttctttcttcctaacattttcatgtgagatccagaaaggacacattgtctctggccattcgaagagagaaagaaagaaagaaaaaaaaggtatttagagacagagagagaaaaaggctgaaatgggttcgctgggttctaaaaatccgcaaaccaaacaagcccaagttcttcttttgggacttgactcagctgggaagtctactctcctttataaattaaagcttgctaaggatattaccaccatccctacaataggtttcaatgtggaaatgatcgagttggaaaggaatctttcactcacagtctgggatgttggaggacaggaaaaaatgagaactgtttggggctgttactgtgagaacaccgatgggctggtgtatgttgtggacagtacagacaaacagcgactggaagagtctcagagacagtttgagcacattttgaagaatgaacacattaaaaatgtgcctgttgttctattagccaacaaacaagacatgcctggagctctgactgctgaggacatcaccagaatgttcaaagtgaagaagctttgcagtgaccggaactggtatgtgcaaccctgctgtgccctcacaggggaggggctggcccaggggttcaggaaattaactggatttgtgaagagccacatgaaatcaagaggagacactttggcgttcttcaagcagaactgaggctgcgaaaaatccaagtctctacagagacactgatgaagttgaaagggtaattgtttttccatgccaaatgaggaaatcaaattaatgagttgacaaacttttcctgagatgttatttcatctacatttagttaaacaacttagaatgatatctagaaaatatttattttcagccaggaactttagcaaactgtggcaatgatcactgggaatgaaaacgtataatgttctacaatttttgttatcacattggatgactttgaatatagtagtgacacttgggaccaaataaattattttatatgactactagaacaaagttttagtaagctgtctgctaatagagtcagaattcttccagattgtttccagctgtaacaggtattgaatttccaccgtgctcctatgtaacagctgggtggtgtaaaaaatgaacttcaaattatggagtggaagaagcgtaatgttaatatcttgtaaattcgtattccctattaaataaagctttcttattccctaaaaaaaaaaaaaaaaaaa

SEQ ID NO: 57 - DNA, 2090 bp, Homo sapiens
ttcggcacgagtaagaccaggatgtctctgaaatggacgtcagtctttctgctgatacagctcagttgttactttagctctggaagctgtggaaaggtgctagtgtggcccacagaatacagccattggataaatatgaagacaatcctggaagagcttgttcagaggggtcatgaggtgactgtgttgacatcttcggcttctactcttgtcaatgccagtaaatcatctgctattaaattagaagtttatcctacatctttaactaaaaatgatttggaagattctcttctgaaaattctcgatagatggatatatggtgtttcaaaaaatacattttggtcatatttttcacaattacaagaattgtgttgggaatattatgactacagtaacaagctctgtaaagatgcagttttgaataagaaacttatgatgaaactacaagagtcaaagtttgatgtcattctggcagatgcccttaatccctgtggtgagctactggctgaactatttaacataccctttctgtacagtcttcgattctctgttggctacacatttgagaagaatggtggaggatttctgttccctccttcctatgtacctgttgttatgtcagaattaagtgatcaaatgattttcatggagaggataaaaaatatgatacatatgctttattttgacttttggtttcaaatttatgatctgaagaagtgggaccagttttatagtgaagttctaggaagacccactacattatttgagacaatggggaaagctgaaatgtggctcattcgaacctattgggattttgaatttcctcgcccattcttaccaaatgttgattttgttggaggacttcactgtaaaccagccaaacccctgcctaaggaaatggaagagtttgtgcagagctctggagaaaatggtattgtggtgttttctctggggtcgatgatcagtaacatgtcagaagaaagtgccaacatgattgcatcagcccttgcccagatcccacaaaaggttctatggagatttgatggcaagaagccaaatacattaggttccaatactcgactgtacaagtggttaccccagaatgaccttcttggtcatcccaaaaccaaagcttttataactcatggtggaaccaatggcatctatgaggcgatctaccatgggatccctatggtgggcattcccttgtttgcggatcaacatgataacattgctcacatgaaagccaagggagcagccctcagtgtggacatcaggaccatgtcaagtagagatttgctcaatgcattgaagtcagtcattaatgaccctgtctataaagagaatgtcatgaaattatcaagaattcatcatgaccaaccaatgaagcccctggatcgagcagtcttctggattgagtttgtcatgcgccacaaaggagccaagcaccttcgagtcgcagctcacaacctcacctggatccagtaccactctttggatgtgatagcattcctgctggcctgcgtggcaactgtgatatttatcatcacaaaattttgcctgttttgtttccgaaagcttgccaaaacaggaaagaagaagaaaagagattagttatatcaaaagcctgaagtggaatgactgaaagatgggactcctcctttatttcagcatggagggttttaaatggaggatttcctttttcctgtgacaaaacatcttttcacaacttaccttgttaagacaaaatttattttccagggatttaatacgtactttagttggaattattctatgtcaatgatttttaagctatgaaaaatacaatggggggaaggatagcatttggagatatacctaatgttaaatgacgagttactggatgcagcacgcaacatggcacatgtgtatacatatgtagctaacccttcgttgtgcacatgtaccctaaaacttaaagtataatttaaaaaaagcaaaaaaaaaaaataccaactcttttttttaaaccaggaaggaaaatgtgaacatggaaacaacttctagtattggatctgaaaataaagtgtcatccaagccataaaaaaaaa

SEQ ID NO: 58 - DNA, 2292 bp, Homo sapiens
ccatgggttccccttcagcctgtccatacagagtgtgcattccctggcaggggctcctgctcacagcctcgcttttaaccttctggaacctgccaaacagtgcccagaccaatattgatgtcgtgccgttcaatgtcgcagaagggaaggaggtccttctagtagtccataatgagtcccagaatctttatggctacaactggtacaaaggggaaagggtgcatgccaactatcgaattataggatatgtaaaaaatataagtcaagaaaatgccccagggcccgcacacaacggtcgagagacaatataccccaatggaaccctgctgatccagaacgttacccacaatgacgcaggattctataccctacacgttataaaagaaaatcttgtgaatgaagaagtaaccagacaattctacgtattctcggagccacccaagccctccatcaccagcaacaacttcaatccggtggagaacaaagatattgtggttttaacctgtcaacctgagactcagaacacaacctacctgtggtgggtaaacaatcagagcctcctggtcagtcccaggctgctgctctccactgacaacaggaccctcgttctactcagcgccacaaagaatgacataggaccctatgaatgtgaaatacagaacccagtgggtgccagccgcagtgacccagtcaccctgaatgtccgctatgagtcagtacaagcaagttcacctgacctctcagctgggaccgctgtcagcatcatgattggagtactggctgggatggctctgatatagcagccttggtgtagtttctgcatttcgggaagagtgtttttattatccacctgcagactggactggattcttctagctccttcaatcccattttctcctgtggcatcactaagtataagacctgctctcttcctgaagacctataagctggaggtggacaactcaatgtaaatttcaaggaaaaaccctcatgcctgagatgtgggccactcagagctaaccaaaatgttcaacaccataactagagacactcaaattgccaaccaggacaagaagttgatgacttcatgctgtggacagtttttcccaagatgtcccaagcctcatcgtgacgaggctcttatcccactccatttttccctgctcatgcctgcctctttaatttggtaagataatgctgtaactagaatttcacaatcagcgccttgtgcaggcaatttgacagagtgttggatgtgtcatgtcatcatgtcaaacccaaatatttgacctaagggatcctttattctgcccagtggctaactttaacaacatccctaatacaactgtttattcaaatgcacggtggtccctgttagagttagacctctagactcacctgttctcacgccctgttttaatttaacccagctatgggatgccagataacagaattgctgcctacgagctgaacagggaggagtttgtgcagttgctgacacttcttgttgcacataaataaatacagtgggtactatagagactcagttgcaaaaattaacaaatatgctgcttgattaaaatgggtaggcttctcatgtggctcattctttaatctattctcttttatttggtttggttcatggggtctctgcctatggatcatacttcaaactcttggtgtgatcctcctgattgtcacaatattagttaccctggtgtgctgtattctctaaaacctttaaatgtttgcatgcagccattcgtcaaatgtcaaatattctctctttggctggaatgacaaaaactcaaataaatgtatgattaggaggacatcataacctatgaatgatggaagtccaaaatgatggtaactgacagtagtgttaatgccttatgtttagtcaaactctcatttaggtgacagcctggtgactccagaatggagccagtcatgctaaatgccatatactcacactgaaacatgaggaagcaggtagatcccagaacagacaaaactttcctaaaaacatgagagtccaggctgtctgagtcagcacagtaagaaagtcctttctgctttaactcttagaaaaaagtaatatgaagtattctgaaattaaccaatcagtttatttaaatcaatttatttatattcttctgttcctggattcccattttacaaaacccactgttctactgttgtattgcccagtaggagctatcactatattttgcagaatggaaactgccctgactcttgaatcacaaataaaagccaattgtatctgtt

SEQ ID NO: 59 - DNA, 1994 bp, Homo sapiens
gctgccaccgctcctgccactgcagtgctcgagccccgtgcaggggagcttgcgggaggatcgaccgacagacggacgcacgccgaggcactgcgcccccagccccgcgccggtgccaccgcagcccgaccccggccgccagtccagccgcccctcgcccggtgcctaggtgcccggccccacaccgccagctgctcggcgcccgggtccgccatgcgctccgccgctgtcctggctcttctgctctgcgccgggcaagtcactgcgctccctgtgaacagccctatgaataaaggggataccgaggtgatgaaatgcatcgttgaggtcatctccgacacactttccaagcccagccccatgcctgtcagccaggaatgttttgagacactccgaggagatgaacggatcctttccattctgagacatcagaatttactgaaggagctccaagacctcgctctccaaggcgccaaggagagggcacatcagcagaagaaacacagcggttttgaagatgaactctcagaggttcttgagaaccagagcagccaggccgagctgaaagaggcggtggaagagccatcatccaaggatgttatggagaaaagagaggattccaaggaggcagagaaaagtggtgaagccacagacggagccaggccccaggccctcccggagcccatgcaggagtccaaggctgaggggaacaatcaggcccctggggaggaagaggaggaggaggaggaggccaccaacacccaccctccagccagcctccccagccagaaatacccaggcccacaggccgagggggacagtgagggcctctctcagggtctggtggacagagagaagggcctgagtgcagagccagggtggcaggcaaagagagaagaggaggaggaggaggaggaggaggctgaggctggagaggaggctgtccccgaggaagaaggccccactgtagtgctgaacccccacccgagccttggctacaaggagatccggaaaggcgagagtcggtcggaggctctggctgtggatggagctgggaagcctggggctgaggaggctcaggaccccgaagggaagggagaacaggagcactcccagcagaaagaggaggaggaggagatggcagtggtcccgcaaggcctcttccggggtgggaagagcggagagctggagcaggaggaggagcggctctccaaggagtgggaggactccaaacgctggagcaagatggaccagctggccaaggagctgacggctgagaagcggctggaggggcaggaggaggaggaggacaaccgggacagttccatgaagctctccttccgggcccgggcctacggcttcaggggccctgggccgcagctgcgacgaggctggaggccatcctcccgggaggacagccttgaggcgggcctgcccctccaggtccgaggctaccccgaggagaagaaagaggaggagggcagcgcaaaccgcagaccagaggaccaggagctggagagcctgtcggccattgaagcagagctggagaaagtggcccaccagctgcaggcactacggcggggctgagacaccggctggcagggctggccccagggcaccctgtggccctggctctgctgtccccttggcaggtcctggccagatggcccggacgctgcttccggtagggaggcagcctccagcctgcccaagcccaggccaccctatcgccccctacgcgccttgtctcctactcctgactcctacctgccctggaacatcctttgcagggcagccccacaactttaaacattgacgattccttctctgaacacaggcagctttctagaagtttcccttcctccatcctatccactgggcacaactgcaataacttctgaccttttggtgaaagctgagaactcctgactgtaacatattctgtatgaactttatctaaagaaaaataaatctgttctgggctctttcctctg

SEQ ID NO: 60 - DNA, 2518 bp, Homo sapiens
ccagcagtggctgcaccatgcacgtgaacggcaaagtggcgctggtgaccggcgcggctcagggcataggcagagcctttgcagaggcgctgctgcttaagggcgccaaggtagcgctggtggattggaatcttgaagcaggtgtacagtgtaaagctgccctgcatgagcaatttgaacctcagaagactctgttcatccagtgcgatgtggctgaccagcaacaactgagagacacttttagaaaagttgtagaccactttggaagactggacattttggtcaataatgctggagtgaataatgagaaaaactgggaaaaaactctgcaaattaatttggtttctgttatcagtggaacctatcttggtttggattacatgagtaagcaaaatggaggtgaaggcggcatcattatcaatatgtcatctttagcaggactcatgcccgttgcacagcagccggtttattgtgcttcaaagcatggcatagttggattcacacgctcagcagcgttggctgctaatcttatgaacagtggtgtgagactgaatgccatttgtccaggctttgttaacacagccatccttgaatcaattgaaaaagaagaaaacatgggacaatatatagaatataaggatcatatcaaggatatgattaaatactatggaattttggacccaccattgattgccaatggattgataacactcattgaagatgatgctttaaatggtgctattatgaagatcacaacttctaagggaattcattttcaagactatgatacaactccatttcaagcaaaaacccaatgaacagcttatgtgttagccatagctgaaaataagcacaaatagcttatattcagatcctatcttcatttgaatatagcttttaaatgaaatgttacagtttgaagttttccttcatgcacttggtgataaacgttttctaaatttttagttaagtatatggataaaaagttatgaactattaaaaatgtgatgtggaccaaaggctaggttgtaatcttgatagtctaaaaaatgatcaaaacaaatgattttcaaggaatattcaatattctgcctttcagaaagtgtatttatatctgtgcttcataaatattaatgttcttcagaacatcattttaaaggagatacttgaattgttatttaaatcaaaccagatgtaaaacactcacatacaagttcatactttaaaagaggaaagctacttaacaatgacaaatatttcacaataataatttttacttatataccatctttcaactgaacatttcagttcttccaagagcttcttagagtagtatattttgggggcagtcaaggaataaactacagtgtaaacatatcccagatgaaaactgctgtatggaaaaatgacagaaagtaactgattgacactgttgattcacagttcagcctcctatctgggaaagacatttctttcctctgctcactttaagaacttttaccgactccaaaaatctcaggaattaaacttttaacagttacagcaataaagaatagttagtactccaaaaatattatatttaagatgctcaacaagaaaaaaatgcaaatgtaatatttttttcaaattacttctttattgacttgtccaaatttcaaaagtgcctacccttcaataaaacttttttattctgatctccataaattacttagtcttctatgtatagctatcaaggaaataaaaccaattttgccacagccacaactgtaaatgtttttgtacccatgctgaaactcataacaacacagacataaaaatagctgtgaggttttgctttttttgttgtcagctatcttaagaatcattaaatacacctgctttgggtaaaactctttgcaagcagtaattaacactagtaacagtgaaagcacaagatttccaaatcagtcgttttctcaaaaaaatatcgtataagtgactcatcctgtctgctaactccagacctcccagcttgaagccaaatctttccatgtgagattgatatggatttcctagaagtactggaatgttgtcatatcttgccctattttaattctgctatagaaaacaattgccttcacttttaaggagtaatttgaatattaataactctggtctagattttcatataatgtattaaagacaaagtagtgaacatcaatgaacatctgatagagataaactgtaatcaggcataagcttgtttgtatgttctggcagtgactaatcagtaaatgatgtcggtttgcccagtatcacttatcttctgtatttttcctctgtcgtgtaaatagtataaccttttcatttatggacaattttttggactagtagccttcaatatacattctgctttgaattaattttttcaaatcaataaattatgtagacatttaaaatcaaatatcaagtagaattgaaaaatgtgagttacataagttaaaaacttactttaaatcttaccttctataggtagctc

SEQ ID NO: 61 - DNA, 1510 bp, Homo sapiens
ggcacgaggcccaagcaggtcggcggcggcggcaggagagcggccgggcgtcagctcctcgacccccgtgtcgggctagtccagcgaggcggacgggcggcgtgggcccatggccaggcccggcatggagcggtggcgcgaccggctggcgctggtgacgggggcctcggggggcatcggcgcggccgtggcccgggccctggtccagcagggactgaaggtggtgggctgcgcccgcactgtgggcaacatcgaggagctggctgctgaatgtaagagtgcaggctaccccgggactttgatcccctacagatgtgacctatcaaatgaagaggacatcctctccatgttctcagctatccgttctcagcacagcggtgtagacatctgcatcaacaatgctggcttggcccggcctgacaccctgctctcaggcagcaccagtggttggaaggacatgttcaatgtgaacgtgctggccctcagcatctgcacacgggaagcctaccagtccatgaaggagcggaatgtggacgatgggcacatcattaacatcaatagcatgtctggccaccgagtgttacccctgtctgtgacccacttctatagtgccaccaagtatgccgtcactgcgctgacagagggactgaggcaagagcttcgggaggcccagacccacatccgagccacgtgcatctctccaggtgtggtggagacacaattcgccttcaaactccacgacaaggaccctgagaaggcagctgccacctatgagcaaatgaagtgtctcaaacccgaggatgtggccgaggctgttatctacgtcctcagcacccccgcacacatccagattggagacatccagatgaggcccacggagcaggtgacctagtgactgtgggagctcctccttccctccccacccttcatggcttgcctcctgcctctggattttaggtgttgatttctggatcacgggataccacttcctgtccacaccccgaccaggggctagaaaatttgtttgagatttttatatcatcttgtcaaattgcttcagttgtaaatgtgaaaaatgggctggggaaaggaggtggtgtccctaattgttttacttgttaacttgttcttgtgcccctgggcacttggcctttgtctgctctcagtgtcttccctttgacatgggaaaggagttgtggccaaaatccccatcttcttgcacctcaacgtctgtggctcagggctggggtggcagagggaggccttcaccttatatctgtgttgttatccagggctccagacttcctcctctgcctgccccactgcaccctctcccccttatctatctccttctcggctccccagcccagtcttggcttcttgtcccctcctggggtcatccctccactctgactctgactatggcagcagaacaccagggcctggcccagtggatttcatggtgatcattaaaaaagaaaaatcgcaaccaaaaaaaaaaaaaaaaaaa

SEQ ID NO: 62 - DNA, 1104 bp, Homo sapiens
ctcggtgcgcgaccccggctcagaggactctttgctgtcccgcaagatgcggatgctgctggcgctcctggccctctccgcggcgcggccatcggccagtgcagagtcacactggtgctacgaggttcaagccgagtcctccaactacccctgcttggtgccagtcaagtggggtggaaactgccagaaggaccgccagtcccccatcaacatcgtcaccaccaaggcaaaggtggacaaaaaactgggacgcttcttcttctctggctacgataagaagcaaacgtggactgtccaaaataacgggcactcagtgatgatgttgctggagaacaaggccagcatttctggaggaggactgcctgccccataccaggccaaacagttgcacctgcactggtccgacttgccatataagggctcggagcacagcctcgatggggagcactttgccatggagatgcacatagtacatgagaaagagaaggggacatcgaggaatgtgaaagaggcccaggaccctgaagacgaaattgcggtgctggcctttctggtggaggctggaacccaggtgaacgagggcttccagccactggtggaggcactgtctaatatccccaaacctgagatgagcactacgatggcagagagcagcctgttggacctgctccccaaggaggagaaactgaggcactacttccgctacctgggctcactcaccacaccgacctgcgatgagaaggtcgtctggactgtgttccgggagcccattcagcttcacagagaacagatcctggcattctctcagaagctgtactacgacaaggaacagacagtgagcatgaaggacaatgtcaggcccctgcagcagctggggcagcgcacggtgataaagtccggggccccgggtcggccgctgccctgggccctgcctgccctgctgggccccatgctggcctgcctgctggccggcttcctgcgatgatggctcacttctgcacgcagcctctctgttgcctcagctctccaagttccaggcttccggtccttagccttcccaggtgggactttaggcatgattaaaatatggacatatttttggag

SEQ ID NO: 63 - DNA, 1484 bp, Homo sapiens
cccgtgaggaggaaaaggtgtgtccgctgccacccagtgtgagcgggtgacaccacccggttaggaaatcccagctcccaagagggtataaatccctgctttactgctgagctcctgctggaggtgaaagtctggcctggcagccttccccaggtgagcagcaacaaggccacgtgctgctgggtctcagtcctccacttcccgtgtcctctggaagttgtcaggagcaatgttgcgcttgtacgtgttggtaatgggagtttctgccttcacccttcagcctgcggcacacacaggggctgccagaagctgccggtttcgtgggaggcattacaagcgggagttcaggctggaaggggagcctgtagccctgaggtgcccccaggtgccctactggttgtgggcctctgtcagcccccgcatcaacctgacatggcataaaaatgactctgctaggacggtcccaggagaagaagagacacggatgtgggcccaggacggtgctctgtggcttctgccagccttgcaggaggactctggcacctacgtctgcactactagaaatgcttcttactgtgacaaaatgtccattgagctcagagtttttgagaatacagatgctttcctgccgttcatctcatacccgcaaattttaaccttgtcaacctctggggtattagtatgccctgacctgagtgaattcacccgtgacaaaactgacgtgaagattcaatggtacaaggattctcttcttttggataaagacaatgagaaatttctaagtgtgagggggaccactcacttactcgtacacgatgtggccctggaagatgctggctattaccgctgtgtcctgacatttgcccatgaaggccagcaatacaacatcactaggagtattgagctacgcatcaagaaaaaaaaagaagagaccattcctgtgatcatttcccccctcaagaccatatcagcttctctggggtcaagactgacaatcccgtgtaaggtgtttctgggaaccggcacacccttaaccaccatgctgtggtggacggccaatgacacccacatagagagcgcctacccgggaggccgcgtgaccgaggggccacgccaggaatattcagaaaataatgagaactacattgaagtgccattgatttttgatcctgtcacaagagaggatttgcacatggattttaaatgtgttgtccataataccctgagttttcagacactacgcaccacagtcaaggaagcctcctccacgttctcctggggcattgtgctggccccactttcactggccttcttggttttggggggaatatggatgcacagacggtgcaaacacagaactggaaaagcagatggtctgactgtgctatggcctcatcatcaagactttcaatcctatcccaagtgaaataaatggaatgaaataattcaaacacaaaaaaaaaaaaaaaaaaaaaaaaaaaaaa

SEQ ID NO: 64 - DNA, 1704 bp, Homo sapiens
atccatgctaaaggtaaacaaactgcaacttatatctgcaatttattttggtatagacaagaggtatgccagtagcacactggtggcttcagaagaaattctcaacacctagctcgccagagagtctatgtatgggattgaacaatctgtaaactaaaggatcctaatcatgaaaataagtatgataaattataagtcactattggcactgttgtttatattagcctcctggatcatttttacagttttccagaactccacaaaggtttggtctgctctaaacttatccatctccctccattactggaacaactccacaaagtccttattccctaaaacaccactgatatcattaaagccactaacagagactgaactcagaataaaggaaatcatagagaaactagatcagcagatcccacccagacctttcacccacgtgaacaccaccaccagcgccacacatagcacagccaccatcctcaaccctcgagatacgtactgcaggggagaccagctgcacatcctactggaggtcaaatgtgggtgtagagattatggaaaaattcaatacaattagtgcctccaaatgcaacaaagaaacagttgcaatgaaagagaaatgcaagtttggaatgacatccacaatccccagtgggcatgtctggagaaacacatggaatcctgtctcctgtagtttggctacagtcaaaatgaaggaatgcctgagaggaaaactcatatacctaatgggagattccacgatccgccagtggatggaatacttcaaagccagtatcaacacactgaagtcagtggatctgcatgaatctggaaaattgcaacaccagcttgctgtggatttggataggaacatcaacatccagtggcaaaaatattgttatcccttgataggatcaatgacctattcagtcaaagagatggagtacctcacccgggccattgacagaactggaggagaaaaaaaatactgtcattgttatttccctgggccagcatttcagaccctttcccattgatgtttttatccgaagggccctcaatgtccacaaagccattcagcatcttcttctgagaagcccagacactatggttatcatcaaaacagaaaacatcagggagatgtacaatgatgcagaaagatttagtgactttcatggttacattcaatatctcatcataaaggacattttccaggatctcagtgtgagtatcattgatgcctgggatataacaattgcatatggcacaaataatgtacacccacctcaacatgtagtcggaaatcagattaatatattattaaactatatttgttaaataacacaaaagtctgaaattcattcacttaagtaaaaaaatttattgactgtctactagcaggccagatgctgtgtttggctctgaattcccaactagcaagagcagagaatctacattatggctgatccataagccaccaattcagctaaatgagatgtttctaatctgggcttccacttaaaaataaaactaaaaatactcatgaaaagagcctacccttcttgatcagagccatacccctcttcaccaatgggaagtcaagacacctatgggtaaaagttctctctgatgcatgaaaactcagagtgataaagtaattttaaaataaaaatttggagaaagcaaaaaaaaaaaaaaaaa

SEQ ID NO: 65 - DNA, 1182 bp, Homo sapiens
acacaggttggagcagagaaagaggaaacatagaggtgccaaaggaacaaagacataatgatgtcatccaagccaacaagccatgctgaagtaaatgaaaccatacccaacccttacccaccaggcagctttatggctcctggatttcaacagcctctgggttcaatcaacttagaaaaccaagctcagggtgctcagcgtgctcagccctacggcatcacatctccgggaatctttgctagcagtcaaccgggtcaaggaaatatacaaatgataaatccaagtgtgggaacagcagtaatgaactttaaagaagaagcaaaggcactaggggtgatccagatcatggttggattgatgcacattggttttggaattgttttgtgtttaatatccttctcttttagagaagtattaggttttgcctctactgctgttattggtggatacccattctggggtggcctttcttttattatctctggctctctctctgtgtcagcatccaaggagctttcccgttgtctggtgaaaggcagcctgggaatgaacattgttagttctatcttggccttcattggagtgattctgctgctggtggatatgtgcatcaatggggtagctggccaagactactgggccgtgctttctggaaaaggcatttcagccacgctgatgatcttctccctcttggagttcttcgtagcttgtgccacagcccattttgccaaccaagcaaacaccacaaccaatatgtctgtcctggttattccaaatatgtatgaaagcaaccctgtgacaccagcgtcttcttcagctcctcccagatgcaacaactactcagctaatgcccctaaatagtaaaagaaaaaggggtatcagtctaatctcatggagaaaaactacttgcaaaaacttcttaagaagatgtcttttattgtctacaatgatttctagtctttaaaaactgtgtttgagatttgtttttaggttggtcgctaatgatggctgtatctcccttcactgtctcttcctacattaccactactacatgctggcaaaggtgaaggatcagaggactgaaaaatgattctgcaactctcttaaagttagaaatgtttctgttcatattactttttccttaataaaatgtcattagaaacaaaaaaaaaaaaaaaaaaa

SEQ ID NO: 66 - DNA, 2786 bp, Homo sapiens
agcactctccagcctctcaccgcaaaattacacaccccagtacaccagcagaggaaacttataacctcgggaggcgggtccttcccctcagtgcggtcacatacttccagaagagcggaccagggctgctgccagcacctgccactcagagcgcctctgtcgctgggacccttcagaactctctttgctcacaagttaccaaaaaaaaaagagccaacatgttggtattgctggctggtatctttgtggtccacatcgctactgttattatgctatttgttagcaccattgccaatgtctggttggtttccaatacggtagatgcatcagtaggtctttggaaaaactgtaccaacattagctgcagtgacagcctgtcatatgccagtgaagatgccctcaagacagtgcaggccttcatgattctctctatcatcttctgtgtcattgccctcctggtcttcgtgttccagctcttcaccatggagaagggaaaccggttcttcctctcaggggccaccacactggtgtgctggctgtgcattcttgtgggggtgtccatctacactagtcattatgcgaatcgtgatggaacgcagtatcaccacggctattcctacatcctgggctggatctgcttctgcttcagcttcatcatcggcgttctctatctggtcctgagaaagaaataaggccggacgagttcatggggatctggggggtggggaggaggaagccgttgaatctgggagggaagtggaggttgctgtacaggaaaaaccgagataggggaggggggagggggaagcaaaggggggaggtcaaatcccaaaccattactgaggggattctctactgccaagcccctgccctggggagaaagtagttggctagtactttgatgctcccttgatggggtccagagagcctccctgcagccaccagacttggcctccagctgttcttagtgacacacactgtctggggccccatcagctgccacaacaccagccccacttctgggtcatgcactgaggtccacagacctactgcactgagttaaaatagcggtacaagttctggcaagagcagatactgtctttgtgctgaatacgctaagcctggaagccatcctgcccttctgacccaaagcaaaacatcacattccagtctgaagtgcctactggggggctttggcctgtgagccattgtccctctttggaacagatatttagctctgtggaattcagtgacaaaatgggaggaggaaagagagtttgtaaggtcatgctggtgggttagctaaaccaagaaggagaccttttcacaatggaaaacctgggggatggtcagagcccagtcgagacctcacacacggctgtccctcatggagacctcatgccatggtctttgctaggcctcttgctgaaagccaaggcagctcttctggagtttctctaaagtcactagtgaacaattcggtggtaaaagtaccacacaaactatgggatccaaggggcagtcttgcaacagtgccatgttagggttatgtttttaggattcccctcaatgcagtcagtgtttcttttaagtatacaacaggagagagatggacatggctcattgtagcacaatcctattactcttcctctaacatttttgaggaagttttgtctaattatcaatattgaggatcagggctcctaggctcagtggtagctctggcttagacaccacctggagtgatcacctcttggggaccctgcctatcccacttcacaggtgaggcatggcaattctggaagctgattaaaacacacataaaccaaaaccaaacaacaggcccttgggtgaaaggtgctatataattgtgaagtattaagcctaccgtatttcagccatgataagaacagagtgcctgcattcccaggaaaatacgaaaatcccatgagataaataaaaatataggtgatgggcagatcttttctttaaaataaaaaagcaaaaactcttgtggtacctagtcagatggtagacgagctgtctgctgccgcaggagcacctctatacaggacttagaagtagtatgttattcctggttaagcaggcattgctttgccctggagcagctattttaagccatctcagattctgtctaaaggggttttttgggaagacgttttctttatcgccctgagaagatctaccccagggagaatctgagacatcttgcctacttttctttattagctttctcctcatccatttcttttatacctttcctttttggggagttgttatgccatgatttttggtatttatgtaaaaggattattactaattctatttctctatgtttattctagttaaggaaatgttgagggcaagccaccaaattacctaggctgaggttagagagattggccagcaaaaactgtgggaagatgaactttgtcattatgatttcattatcacatgattatagaaggctgtcttagtgcaaaaaacatacttacatttcagacatatccaaagggaatactcacattttgttaagaagttgaactatgactggagtaaaccatgtattcccttatcttttactttttttctgtgacatttatgtctcatgtaatttgcattactctggtggattgttctagtactgtattgggcttcttcgttaatagattatttcatatactataattgtaaatattttgatacaaatgtttataactctagggatataaaaacagattctgattcccttcaaaaaaaaaaaa

SEQ ID NO: 67 - DNA, 7586 bp, Homo sapiens
gttctttgtgacacatcacacagaattggagtgctgtccttctggagagtggtggagaaccaagatacagttcagaaccaaaggaatagagaagggctttgatttctttttggctttagattggggatttgggaggcttagcaggaaagatgtccactgaaaatgtggaagggaagcccagtaaccttggggagagaggaagagcccggagctccactttcctcagggttgtccagccaatgtttaaccacagtattttcacttctgcagtctctcctgctgcagaacgcatccgattcatcttgggagaggaggatgacagcccagctccccctcagctcttcacggaactggatgagctgctggccgtggatgggcaggagatggagtggaaggaaacagccaggtggatcaagtttgaagaaaaagtggaacagggtggggaaagatggagcaagccccatgtggccacattgtcccttcatagtttatttgagctgaggacatgtatggagaaaggatccatcatgcttgatcgggaggcttcttctctcccacagttggtggagatgattgttgaccatcagattgagacaggcctattgaaacctgaacttaaggataaggtgacctatactttgctccggaagcaccggcatcaaaccaagaaatccaaccttcggtccctggctgacattgggaagacagtctccagtgcaagtaggatgtttaccaaccctgataatggtagcccagccatgacccataggaatctgacttcctccagtctgaatgacatttctgataaaccggagaaggaccagctgaagaataagttcatgaaaaaattgccacgtgatgcagaagcttccaacgtgcttgttggggaggttgactttttggatactcctttcattgcctttgttaggctacagcaggctgtcatgctgggtgccctgactgaagttcctgtgcccacaaggttcttgttcattctcttaggtcctaaggggaaagccaagtcctaccacgagattggcagagccattgccaccctgatgtctgatgaggtgttccatgacattgcttataaagcaaaagacaggcacgacctgattgctggtattgatgagttcctagatgaagtcatcgtccttccacctggggaatgggatccagcaattaggatagagcctcctaagagtcttccatcctctgacaaaagaaagaatatgtactcaggtggagagaatgttcagatgaatggggatacgccccatgatggaggtcacggaggaggaggacatggggattgtgaagaattgcagcgaactggacggttctgtggtggactaattaaagacataaagaggaaagcgccattttttgccagtgatttttatgatgctttaaatattcaagctctttcggcaattctcttcatttatctggcaactgtaactaatgctatcacttttggaggactgcttggggatgccactgacaacatgcagggcgtgttggagagtttcctgggcactgctgtctctggagccatcttttgcctttttgctggtcaaccactcactattctgagcagcaccggacctgtcctagtttttgagaggcttctatttaatttcagcaaggacaataattttgactatttggagtttcgcctttggattggcctgtggtccgccttcctatgtctcattttggtagccactgatgccagcttcttggttcaatacttcacacgtttcacggaggagggcttttcctctctgattagcttcatctttatctatgatgctttcaagaagatgatcaagcttgcagattactaccccatcaactccaacttcaaagtgggctacaacactctcttttcctgtacctgtgtgccacctgacccagctaatatctcaatatctaatgacaccacactggccccagagtatttgccaactatgtcttctactgacatgtaccataatactacctttgactgggcatttttgtcgaagaaggagtgttcaaaatacggaggaaaccttgtcgggaacaactgtaattttgttcctgatatcacactcatgtcttttatcctcttcttgggaacctacacctcttccatggctctgaaaaaattcaaaactagtccttattttccaaccacagcaagaaaactgatcagtgattttgccattatcttgtccattctcatcttttgtgtaatagatgccctagtaggcgtggacaccccaaaactaattgtgccaagtgagttcaagccaacaagtccaaaccgaggttggttcgttccaccgtttggagaaaacccctggtgggtgtgccttgctgctgctatcccggctttgttggtcactatactgattttcatggaccaacaaattacagctgtgattgtaaacaggaaagaacataaactcaagaaaggagcagggtatcacttggatctcttttgggtggccatcctcatggttatatgctccctcatggctcttccgtggtatgtagctgctacggtcatctccattgctcacatcgacagtttgaagatggagacagagacttctgcacctggagaacaaccaaagtttctaggagtgagggaacaaagagtcactggaacccttgtgtttattctgactggtctgtcagtctttatggctcccatcttgaagtttatacccatgcctgtactctatggtgtgttcctgtatatgggagtagcatcccttaatggtgtgcagttcatggatcgtctgaagctgcttctgatgcctctgaagcatcagcctgacttcatctacctgcgtcatgttcctctgcgcagagtccacctgttcactttcctgcaggtgttgtgtctggccctgctttggatcctcaagtcaacggtggctgctatcatttttccagtaatgatcttggcacttgtagctgtcagaaaaggcatggactacctcttctcccagcatgacctcagcttcctggatgatgtcattccagaaaaggacaagaaaaagaaggaggatgagaagaaaaagaaaaagaagaagggaagtctggacagtgacaatgatgattctgactgcccatactcagaaaaagttccaagtattaaaattccaatggacatcatggaacagcaacctttcctaagcgatagcaaaccttctgacagagaaagatcaccaacattccttgaacgccacacatcatgctgataaaattcctttccttcagtcactcggtatgccaagtcctcctagaactccagtaaaagttgcctcaaattagactagaacttgaacctgaagacaatgattatttctggaggagcaagggaacagaaactacattgtaacctgtttgtctttcttaaaactgacatttgttgttaatgtcatttgtttttgtttggctgtttgtttattttttaacttttatttcgtctcagtttttggtcacaggccaaataatacagcgctctctctgcttctctcttgcatagatacaatcaagacaatagtgcaccgttccttaaaaacagcatctgaggaatcccccttttgttcttaaactttcagatgtgtcctttgataaccaaattctgtcactcaagacacagacacccacagaccctgtcctttgcctctattaagcagaggatggaagtattaaggattttgtaacaccttttatgaaaatgttgaaggaacttaaaactttagctttggagctgtgcttactggcttgtctttgtctggtagaacaaaccttgacctccagacagagtcccttctcacttatagagctctccaggactggaaaaagtgctgctattttaacttgctcttgcttgtaaatcctaatcttagagttatcaaaagaagaaaaaactgaaggtactttactccctatagagaaaccattgccatcattgtagcaagtgctggaatgtcccttttttcctatgcaacttttttataaccctttaatgaacttatctgtggagtacattgaagaatatttttcttcctagattttgttgtttaaattatggggcctaacctgccacttattttttgtcaatttttaaaacttttttttaattactgtaaagaaaatgaattttttcctgcagcaggaaacatagttttcagtagttctacctcttatttgtagctgccaggctttctgtaaaaattgtattgtatataatgtgatttttacacatacatacacacacaaatacacaatctctagggtaagccagaaggcaagatcagattaaaaacaccatgtttctaagcatccatttttccctttctttaaaagaaacttaactgttctatgaaggagattgagggagaagagacaaactcctatgtcatgagaataaccgatgttctgataatagtagcatctaggtacagatgctggttgtattaccacgtcaatgtcctatgcagtattgttagacattttctcattttgaaatatttgtgtgtttgtgtatgtgctctgtgccatggctggtgtatatatgtgcaatgttagaaggcaaaagagtgatggtaggcagagggcaaagtcattgaatctcttatgccagttttcataaaacccaaaccacatatgaaaaaatccattaagggtccaagaagtctgtccatatgaaaatgagggtaaatatagtttatttcccaggtatcagtcattataattgatataatagctctaacatgcaatataaaattcataggagtattaatagcccatttacacatctataaaatgtaatgggattgcagagctgcagagtacagtgtaacagtactctcatgcaatttttttcaggatgcaaaggcaattattctttgtaagcgggacatttagatatatttgtgtacatattatatgtatgtatatttcaaagtaccacactgaaaattagacatttattaaccaaatttaacgtggtatttaaaggtaatatttttaatatgatacattacatattgtgaatgtatactaaaaaaacattttaaatgttaaaattataatttcagattcatataaccacaactgtgatatatcctaactataaccagttgttgaggggtatactagaagcagaatgaaaccacattttttggtttgataatatgcacttattgactcccactcattgttatgttaattaagttattattctgtctccttgtaattttgattacaaaaattttattatcctgagttagctgttacttttacagtacctgatactcctaaaacttttaacttatacaaattagtcaataatgaccccaattttttcattaaaataatagtggtgaattatatgttattgtgttaaaacctcacttgccaaattctggcttcacatttgtatttagggctatccttaaaatgatgagtctatattatctagctttctattaccctaatataaactggtataagaagactttccttttttctttatgcatggaagcatcaataaattgtttaaaaaccatgtatagtaaattcagcttaacccgtgatcttcttaagttaaaggtacttttgttttataaaagctctagataaaactttcttttctgatcatgaatcaagtatctgtggtttcatgcccctctctatacctttcaaagaactcctgaagcaacttaactcatcatttcagcctctgagtagaggtaaaacctatgtgtacttctgtttatgatccatattgatatttatgacatgaacacagaatagtaccttacatttgctaaacagacagttaatatcaaatcctttcaatattctgggaacccagggaagtttttaaaaatgtcattactttcaaaggaacagaagtagttaaccaaactaacaagcaaaacctgaggtttacctagtgacaccaaattatcggtattttaactgaatttacccattgactaagaatgaaccggatttggtggtggttttgtttctatgcaaactggacacaaattacaacagtaaatttttttataagtgcttctcccttctccatgatgtgacttccggagataaaggattcaaaagataaagacaaagtacgctcagagttgttaaccagaaagtcctggctgtggttgcagaaacactgttggaagaaaagagatgactaagtcaagtgtctgccttatcaaaagagcaaaaatgcctctggttttgtgtttgggagaaaaatatcttggacgcactgttttccttgataaaagtcatcttctctactgtgtgaaatgaatacttggaattctaattgttttgtgtgccaggggcagtaatgtccctgcctcttctcccaatcaaggttgaggagtggggctggggagaggacttaactgacttaagaagtaggaaaacaaaaacctctctcctcagccttccacctccaagagaggaggaaaaacagttgtctgctgtctgtaattcagtttgcgtgtattttatgctcatgcaccaacccatacagagtaaatcttttatcaactatatactggtgtttaatagagaatgattgtcttccgagttttttggttccttttttaactgtgttaaagtacttgaaatgtattgactgctgactatattttaaaaacaaaatgaaataatttgagttgtattacagaggttgacattgttcagggatgggacaaagccttcttcaatccttttcatactacttaatgattttggtgcaggaacctgagattttctgatttatatttcatgatatttcacatttgctcttcacagcatgagcatgaagcccagtggcaccaaatggctgggtacaatcaagtgatattttgtagcacctcactatctgaaaggccatgagttttcagatgatttcattgagcttcattgcagcctgaaattttaaaaaagttgtgtaatacgccaaccagtcaagttgtgttttggccagagatttagatatgtccaatttcctggctcatttcattgtgctctatgggtacgtataaaaagcaagaattctgtttcctaggcaaacattgcaactcagggctaaagtcatccagtgaaacttttagagccagaagtaactttgtcccagtcctacaatgtgaaaagagtgaatagttgcctctttttagccattttcatggctggtacatattcgtacgcattacttttcagaatcaatacgcactttcagatattcttatttttattctcttaagtctttattaactttggagagagaaatgatgcatctttttattttaaatgaagtagatcaacatggtggaacaaaatgataaagaacagaaaacatttcaatatattactaataactttttccaatataaatcctaaaattcctataacatagtattttacagttttatgaagctttctattgtgacttttatggaattaagagatgaagaagatgagatattttagcatttatatttttcaaaattatatgtatacttaaaaataaagtaactttatgc

SEQ ID NO: 68 - DNA, 1470 bp, Homo sapiens
atgcactcaagcagagaagaaatccacaagtactcaccagcctcctggtctgcagagaagacagaatcaatatgagcacagcaggaaaagtaatcaaatgcaaagcagctgtgctatgggagttaaagaaacccttttccattgaggaggtagaggttgcacctcctaaggctcatgaagttcgcattaagatggtggctgcaggaatctgtcgttcagatgagcatgtggttagtggcaacctggtgaccccccttcctgtgattttaggccatgaggcagccggcatcgtggaaagtgttggagaaggggtgactacagtcaaaccaggtgataaagtcatcccgctctttactcctcagtgtggaaaatgcagaatttgtaaaaacccagaaagcaactactgcttgaaaaatgatctaggcaatcctcgggggaccctgcaggatggcaccaggaggttcacctgcagcgggaagcccatccaccacttcgtcggcgtcagcaccttctcccagtacacagtggtggatgagaatgcagtggccaaaattgatgcagcctcgcccctggagaaagtctgcctcattggctgtggattttcgactggttatgggtctgcagtcaaagttgccaaggtcaccccagggtctacctgtgctgtgtttggcctgggaggggtcggcctatctgttgttatgggctgtaaagcagctggagcagccagaatcattgctgtggacatcaacaaggacaaatttgcaaaggctaaagagttgggggccactgaatgcatcaaccctcaagactacaagaaacccattcaggaagtgctaaaggaaatgactgatggaggtgtggatttttcgtttgaagtcatcggtcggcttgacaccatgatggcttccctgttatgttgtcatgaggcatgtggcacaagtgtcattgtaggggtacctcctgattcccagaacctctcaataaaccctatgctgctactgactggacgcacgtggaaaggagctatttttggaggctttaagagtaaagaatctgtcccgaaacttgtggctgactttatggctaagaagttttcactggatgcattaataacaaatattttaccttttgaaaaaataaatgaaggatttgacctgcttcgctctggaaagagtatccgtaccgtcctgacgttttgaaacaatacagatgccttcccttgtagcagttttcagcctcctctaccctacatgatctggagcaacagctaggaaatatcattaattctgctcttcagagatgttaaaaataaattacacgtgggagctttccaaagaaatggaaattgatgggaaattatttgtcaagcaaatgtttaaaatccaaatgagaactaaataaagtgttgaacatcaactggggaattgaagccaataaaccttccttcttaaccattcaaaaaaaaaaaaa

SEQ ID NO: 69 - DNA, 3464 bp, Homo sapiens
cagccgtgctcgaagcgttcctggagcccaagctctcctccacaggtgaagacagggccagcaggagacaccatggggcacctctcagccccacttcacagagtgcgtgtaccctggcaggggcttctgctcacagcctcacttctaaccttctggaacccgcccaccactgcccagctcactactgaatccatgccattcaatgttgcagaggggaaggaggttcttctccttgtccacaatctgccccagcaactttttggctacagctggtacaaaggggaaagagtggatggcaaccgtcaaattgtaggatatgcaataggaactcaacaagctaccccagggcccgcaaacagcggtcgagagacaatataccccaatgcatccctgctgatccagaacgtcacccagaatgacacaggattctacaccctacaagtcataaagtcagatcttgtgaatgaagaagcaactggacagttccatgtatacccggagctgcccaagccctccatctccagcaacaactccaaccctgtggaggacaaggatgctgtggccttcacctgtgaacctgagactcaggacacaacctacctgtggtggataaacaatcagagcctcccggtcagtcccaggctgcagctgtccaatggcaacaggaccctcactctactcagtgtcacaaggaatgacacaggaccctatgagtgtgaaatacagaacccagtgagtgcgaaccgcagtgacccagtcaccttgaatgtcacctatggcccggacacccccaccatttccccttcagacacctattaccgtccaggggcaaacctcagcctctcctgctatgcagcctctaacccacctgcacagtactcctggcttatcaatggaacattccagcaaagcacacaagagctctttatccctaacatcactgtgaataatagtggatcctatacctgccacgccaataactcagtcactggctgcaacaggaccacagtcaagacgatcatagtcactgagctaagtccagtagtagcaaagccccaaatcaaagccagcaagaccacagtcacaggagataaggactctgtgaacctgacctgctccacaaatgacactggaatctccatccgttggttcttcaaaaaccagagtctcccgtcctcggagaggatgaagctgtcccagggcaacaccaccctcagcataaaccctgtcaagagggaggatgctgggacgtattggtgtgaggtcttcaacccaatcagtaagaaccaaagcgaccccatcatgctgaacgtaaactataatgctctaccacaagaaaatggcctctcacctggggccattgctggcattgtgattggagtagtggccctggttgctctgatagcagtagccctggcatgttttctgcatttcgggaagaccggcagggcaagcgaccagcgtgatctcacagagcacaaaccctcagtctccaaccacactcaggaccactccaatgacccacctaacaagatgaatgaagttacttattctaccctgaactttgaagcccagcaacccacacaaccaacttcagcctccccatccctaacagccacagaaataatttattcagaagtaaaaaagcagtaatgaaacctgtcctgctcactgcagtgctgatgtatttcaagtctctcaccctcatcactaggagattcctttcccctctagggtagaggggtggggacagaaacaactttctcctactcttccttcctaataggcatctccaggctgcctggtcactgcccctctctcagtgtcaatagatgaaagtacattgggagtctgtaggaaacccaaccttcttgtcattgaaatttggcaaagctgactttgggaaagagggaccagaacttcccctcccttccccttttcccaacctggacttgttttaaacttgcctgttcagagcactcattccttcccacccccagtcctgtcctatcactctaattcggatttgccatagccttgaggttatgtccttttccattaagtacatgtgccaggaaacagcgagagagagaaagtaaacggcagtaatgcttctcctatttctccaaagccttgtgtgaactagcaaagagaagaaaaccaaatatataaccaatagtgaaatgccacaggtttgtccactgtcagggttgtctacctgtaggatcagggtctaagcaccttggtgcttagctagaataccacctaatccttctggcaagcctgtcttcagagaacccactagaagcaactaggaaaaatcacttgccaaaatccaaggcaattcctgatggaaaatgcaaaagcacatatatgttttaatatctttatgggctctgttcaaggcagtgctgagagggaggggttatagcttcaggagggaaccagcttctgataaacacaatctgctaggaacttgggaaaggaatcagagagctgcccttcagcgattatttaaattattgttaaagaatacacaatttggggtattgggatttttctccttttctctgagacattccaccattttaatttttgtaactgcttatttatgtgaaaagggttatttttacttagcttagctatgtcagccaatccgattgccttaggtgaaagaaaccaccgaaatccctcaggtcccttggtcaggagcctctcaagattttttttgtcagaggctccaaatagaaaataagaaaaggttttcttcattcatggctagagctagatttaactcagtttctaggcacctcagaccaatcatcaactaccattctattccatgtttgcacctgtgcattttctgtttgcccccattcactttgtcaggaaaccttggcctctgctaaggtgtatttggtccttgagaagtgggagcaccctacagggacactatcactcatgctggtggcattgtttacagctagaaagctgcactggtgctaatgccccttgggaaatggggctgtgaggaggaggattataacttaggcctagcctcttttaacagcctctgaaatttatcttttcttctatggggcttataaatgtatcttataataaaaaggaaggacaggaggaagacaggcaaatgtacttctcacccagtcttctacacagatggaatctctttggggctaagagaaaggttttattctatattgcttacctgatctcatgttaggcctaagaggctttctccaggaggattagcttggagttctctatactcaggtacctctttcagggttttctaaccctgacacggactgtgcatactttccctcatccatgctgtgctgtgttatttaatttttcctggctaagatcatgtctgaattatgtatgaaaattattctatgtttttataataaaaataatatatcagacatcgaaaaaaaaaa

SEQ ID NO: 70 - DNA, 2578 bp, Homo sapiens
aagtgccttgaattccttggtaattatttccttttaagcgtgtaactcttattattgctaaactgctttttaagttaatggtagttgttgtccaaaggaagtctgatctgtgtttttgaaacctcaatgatcgtctgtttctaattaaggaattggatgaagacatgcatcagaaaattgcaagggagatgaacctctctgaaactgcttttatccgaaaactgcacccgacagacaactttgcacaaagttcctgctttggactgagatggtttacaccagcgagtgaggtcccactctgtggccatgccaccctggcttctgcagctgtgctgtttcacaaaataaaaaacatgaacagcacgctcacgtttgtcactctgagtggagaactaagggccagacgagcagaggacggcatcgtcctggacttgcctctttatccagcccacccccaggacttccatgaagtagaggacttgataaagactgccataggcaacacactggtccaggacatctgttattctccagatacccaaaagctcctcgtccgcctcagtgacgtttacaacaggtcgtttctggagaacctgaaagtgaacacggagaatctgctgcaagttgaaaacacagggaaggtgaaagggcttattcttacccttaaaggagagcctggtgggcagacccaagcatttgacttttactcaagatattttgcaccgtgggttggtgtggctgaagacccagtgacagggtctgcacacgctgttctcagcagctactggtcccagcatctggggaagaaagaaatgcatgcttttcagtgttcccaccgaggaggagagctgggaatttcccttcgtccagacggaagggttgacattagaggaggtgcagctgttgttttagagggcacactgacagcctagaggtggttatgctgtgacgctgctgtctctaaccaccaagtattttctgcttaaaaagaaatgtaaggggctgcctttagcaaatgtgcgtagtagtctacttaatcctcatgttaaaaatcgaaaaatgggccaggcgcagtggctcatgcctgtaatcgtagcactttgagaggccaaggtgggtggatcacctgaggtcaggggttcgacaccagcctggccaacatggtgaaacctcgtctctactacaaatacaaaaattagctgggtgtggtgccacatgcctgtaattccagctacttgggaggctgaggcatggagaatcgcttgaacccaggaggcagaagttgcagtgagcagagatcacaccactgcactccagcctgggcaacagagtaagactccatccacacacacacacacacacacaaaattgaaaagtgaagacattttaatggagatttaatagtgctttccagactaatgaactaatggagttttggctccactcatgagtgtatttgaaatgtaagtaaccagctacaaagaataatgtcacttcatttgattatgactaccaatcaagagaaggaggaatacatttctgaggagtgatactaaaccatttgagcttaaatgagtacctgattttgcagccattaaaatgagtcaataactatgtggaaatatagaaaaatattttataatataatactaagaaagaggacagtaggccataaagtgttagcagtgttatgctatgtctatataaataagcatgggccattaaaaatagcaaactgaaaacagttcatgtgtggggggcaagtttagaagtaattttaatgtatctaagaagtgatttcctttattgttgtactcaggtacgaagactaaaaatcaggatgaatccagaaaattaacacaaaaaagtatgtattaggctacttcctgtcatagtgaaattaaacactcaaagtaatgtaatctcagctgggcgtggcggctcatgcctgtaatcccagcactttggcaggacaaggcaggaggatcacttgaacctaggagttcgagaccagcctgggcaacacagcgagaacttgtctctattaaaaaaaaaaaaaaaggaatgtaatttcaatctttttcttgatatatggcttgagaatgataatgtaaaagggaattcttctcttacttcaataaaatgggttttaacataactttaaattcagttaaatatacaatattgaatacctatagttgactttgggatggggactttttcaagtcattaagagtgtttgtttaaggtgatctcattgatggtagttctcagccgtctcaaaaactgcaagctaatcagtcagacattctttaatgaccccaattttttcactttaattgttaccatgttttctatttttactgatttttgctaaagcatgtaagagtgaatttattatagcagtaatcttgtgtttctcctgatgtgcaataaatcaataattcaccagcaaaaaaaaaaaaaaaaaaaaaaaaaaaaaaaaaaaaaaaaaaaaaaaaaaaaaaaaaaaaaaaaaaaaaaaaaaaaaaaaaaaaaaaaaaaaaaaaaaaaaaaaaaaaaaaaaaaaaaaaaaaaa

SEQ ID NO: 71 - DNA, 2657 bp, Homo sapiens
tgggaacacaaacttgctggcgggaagagcccggaaagaaacctgtggatctcccttcgagatcatccaaagagaagaaaggtgacctcacattcgtgccccttagcagcactctgcagaaatgcctcctcagctgcaaaacggcctgaacctctcggccaaagttgtccagggaagcctggacagcctgccccaggcagtgagggagtttctcgagaataacgctgagctgtgtcagcctgatcacatccacatctgtgacggctctgaggaggagaatgggcggcttctgggccagatggaggaagagggcatcctcaggcggctgaagaagtatgacaactgctggttggctctcactgaccccagggatgtggccaggatcgaaagcaagacggttatcgtcacccaagagcaaagagacacagtgcccatccccaaaacaggcctcagccagctcggtcgctggatgtcagaggaggattttgagaaagcgttcaatgccaggttcccagggtgcatgaaaggtcgcaccatgtacgtcatcccattcagcatggggccgctgggctcacctctgtcgaagatcggcatcgagctgacggattcgccctacgtggtggccagcatgcggatcatgacgcggatgggcacgcccgtcctggaagcactgggcgatggggagtttgtcaaatgcctccattctgtggggtgccctctgcctttacaaaagcctttggtcaacaactggccctgcaacccggagctgacgctcatcgcccacctgcctgaccgcagagagatcatctcctttggcagtgggtacggcgggaactcgctgctcgggaagaagtgctttgctctcaggatggccagccggctggcagaggaggaagggtggctggcagagcacatgctgattctgggtataaccaaccctgagggtgagaagaagtacctggcggccgcatttcccagcgcctgcgggaagaccaacctggccatgatgaaccccagcctccccgggtggaaggttgagtgcgtcggggatgacattgcctggatgaagtttgacgcacaaggtcatttaagggccatcaacccagaaaatggctttttcggtgtcgctcctgggacttcagtgaagaccaaccccaatgccatcaagaccatccagaagaacacaatctttaccaatgtggccgagaccagcgacgggggcgtttactgggaaggcattgatgagccgctagcttcaggcgtcaccatcacgtcctggaagaataaggagtggagctcagaggatggggaaccttgtgcccaccccaactcgaggttctgcacccctgccagccagtgccccatcattgatgctgcctgggagtctccggaaggtgttcccattgaaggcattatctttggaggccgtagacctgctggtgtccctctagtctatgaagctctcagctggcaacatggagtctttgtgggggcggccatgagatcagaggccacagcggctgcagaacataaaggcaaaatcatcatgcatgacccctttgccatgcggcccttctttggctacaacttcggcaaatacctggcccactggcttagcatggcccagcacccagcagccaaactgcccaagatcttccatgtcaactggttccggaaggacaaggaaggcaaattcctctggccaggctttggagagaactccagggtgctggagtggatgttcaaccggatcgatggaaaagccagcaccaacgtcacgcccataggctacatccccaaggaggatgccctgaacctgaaaggcctggggcacatcaacatgatggagcttttcagcatctccaaggaattctgggacaaggaggtggaagacatcgagaagtatctggtggatcaagtcaatgccgacctcccctgtgaaatcgagagagagatccttgccttgaagcaaagaataagccagatgtaatcagggcctgagaataagccagatgtaatcagggcctgagtgctttacctttaaaatcattaaattaaaatccataaggtgcagtaggagcaagagagggcaagtgttcccaaattgacgccacctaataatcatcaccacaccgggagcagatctgaaggcacactttgatttttttaaggataagaaccacagaacactgggtagtagctaatgaaattgagaagggaaatcttagcatgcctccaaaaattcacatccaatgcatactttgttcaaatttaaggttactcaggcattgatcttttcagtgttttttcacttagctatgtggattagctagaatgcacaccaaaaagatacttgagctgtatatatatatgtgtgtgtgtgtgtgtgtgtgtgtgtgtgtgcatgtatgtgcacatgtgtctgtgtgatatttggtatgtgtatttgtatgtactgttattcaaaatatatttaatacctttggaaaatcttgggcaagatgacctactagttttccttgaaaaaaagttgctttgttattaatattgtgcttaaattatttttatacaccattgttccttacctttacataattgcaatatttcccccttactacttcttggaaaaaaattagaaaatgaagtttatagaaaag

SEQ ID NO: 72 - DNA, 2107 bp, Homo sapiens
ggcacgaggaaagaaacaacaactggaaaagaagcattgcataagaccaggatgtctctgaaatggatgtcagtctttctgctgatgcagctcagttgttactttagctctgggagttgtggaaaggtgctggtgtggcccacagaatacagccattggataaatatgaagacaatcctggaagagcttgttcagaggggtcatgaggtgattgtgttgacatcttcggcttctattcttgtcaatgccagtaaatcatctgctattaaattagaagtttatcctacatctttaactaaaaatgatttggaagatttttttatgaaaatgttcgatagatggacatatagtatttcaaaaaatacattttggtcatatttttcacaactacaagaattgtgttgggaatattctgactataatataaagctctgtgaagatgcagttttgaacaagaaacttatgagaaaactacaagagtcaaaatttgatgtccttctggcagatgccgttaatccctgtggtgagctgctggctgaactacttaacataccctttctgtacagtctccgcttctctgttggctacacagttgagaagaatggtggaggatttctgttccctccttcctatgtacctgttgttatgtcagaattaagtgatcaaatgattttcatggagaggataaaaaatatgatatatatgctttattttgacttttggtttcaagcatatgatctgaagaagtgggaccagttttatagtgaagttctaggaagacccactacattatttgagacaatggggaaagctgaaatgtggctcattcgaacctattgggattttgaatttcctcgcccattcttaccaaatgttgattttgttggaggacttcactgtaaaccagccaaacccttgcctaaggaaatggaagagtttgtgcagagctctggagaaaatggtattgtggtgttttctctggggtcgatgatcagtaacatgtcagaagaaagtgccaacatgattgcatcagcccttgcccagatcccacaaaaggttctatggagatttgatggcaagaagccaaatactttaggttccaatactcgactgtataagtggttaccccagaatgaccttcttggtcatcccaaaaccaaagcttttataactcatggtggaaccaatggcatctatgaggcgatctaccatgggatccctatggtgggcattcccttgtttgcggatcaacatgataacattgctcacatgaaagccaagggagcagccctcagtgtggacatcaggaccatgtcaagtagagatttgctcaatgcattgaagtcagtcattaatgaccctatctataaagagaatatcatgaaattatcaagaattcatcatgatcaaccggtgaagcccctggatcgagcagtcttctggattgagtttgtcatgcgccataaaggagccaagcaccttcgggtcgcagcccacaacctcacctggatccagtaccactctttggatgtgatagcattcctgctggcctgcgtggcaactatgatatttatgatcacaaaatgttgcctgttttgtttccgaaagcttgccaaaacaggaaagaagaagaaaagggattagttatatcaaaagcctgaagtggaatgaccaaaagatgggactcctcctttattccagcatggagggttttaaatggaggatttcctttttcctgcgacaaaacgtcttttcacaacttaccctgttaagtcaaaatttattttccaggaatttaatatgtactttagttggaattattctatgtcaatgatttttaagctatgaaaaataataatataaaaccttatgggcttatattgaaatttattattctaatccaaaagttaccccacacaaaagttactgagcttccttatgtttcacacattgtatttgaacacaaaacattaacaactccactcatagtatcaacattgttttgcaaatactcagaatattttggcttcattttgagcagaatttttgtttttaattttgccaatgaaatcttcaataattaaaaaaaaaaaaaaaaaaaaaaaaa

SEQ ID NO: 73 - DNA, 1427 bp, Homo sapiens
ctgggaatatgattatgcttaatctatgctcagtcgaaaggggctggggctgctttctcccctcccttcttgactctctgttcacagaactcaggctgcctccagccagcctttgcccgctagactcactggccctgagcacttgaaggtgcagcaagtcactgagaatgagcactttcttctcggacacagcatggatctgcctggctgtccccacagtactatgtgggacagtattttgcaaatacaagaagagctcagggcagctgtggagctggatggtctgcctggcaggcctctgtgcagtctgcctgctcatcctgtcccctttttggggcttgatcctcttctcggtgtcatgcttcctcatgtatacttacttatctggccaagaattgttacctgtggatcagaaggcagtcctggtgacaggtggtgattgcgggcttggccatgctttgtgcaagtatctggatgagctgggcttcacggtatttgccggagttttgaatgaaaatggcccaggagctgaggaattgcgaagaacctgctctccgcgcctctcggtgctccaaatggacatcacgaagccagtgcagataaaagatgcttacagcaaggttgcagcaatgctgcaggacagaggactgtgggctgtgatcaacaatgctggggtgcttggctttccaactgatggggagcttcttcttatgactgactacaaacaatgcatggccgtgaacttctttggaactgtggaggtcacaaagacgtttttgcctcttcttagaaaatccaaagggaggctggtgaatgtcagcagcatgggaggaggggccccaatggaaaggctggcatcttatggctcatcaaaggcggctgtgaccatgttctcatcagttatgagactggagctttccaagtggggaattaaagttgcttccatccaacctggaggcttcctaacaaatatcgcaggcaccagtgacaagtgggaaaagctggagaaggacattctggaccacctccccgctgaggtacaggaagactacggccaggactacatcttagcacagcggaatttcctcctattgatcaactcgttagccagcaaggacttctctccggtgctgcgggacatccagcatgctatcttggcgaagagcccttttgcctattacacgccagggaaaggcgcttacttgtggatctgccttgctcactatttgcctattggcatatatgattactttgctaaaagacattttggccaagacaagcccatgcccagagctctaagaatgcctaactacaagaaaaaggccacctaggcaatggaagccctcaaagaagtcggaatgtcatagtcttgaaatgaaagggaaactgggaaactgggtttctcattaaagttgtttcccactctg

SEQ ID NO: 74 - DNA, 2396 bp, Homo sapiens
ggcaccaggtctcccaggcttcctcagcgtcgacgccggggagcgccctggggttgggagcgcccggggcccgcgaaggaggaggtggctcaggtgtcagggcgcaccgtgggaaccggccccgggggaggcgtggaaacgcggggcctgggactcgaccagcctctcccgtgcggatcgcaaaatctcggagctgaaacagcccgttgttcgcagcctccctctgacccgccaccctgcacattgttttccattcgcccgggtcgcgggtgggaggagaggcacgccggggttctggagcttggccgcgcgccaggcttgtggccttcgtccccctggggccactggggcggccacgcctctccggcgggaggagagaacgcgtgggtccgggtggctgctccggcccttccgcctccagctcggccatggggtcgcgcagctcccacgccgcggtcattcccgacggggacagtattcggcgagagaccggcttctcccaagccagcctgctccgcctgcaccaccggttccgggcactggacaggaataagaagggctacctgagccgcatggatctccagcagataggggcgctcgccgtgaaccccctgggagaccgaattatagaaagcttcttccccgatgggagccagcgagtggatttcccaggctttgtcagggtcttggctcattttcgccctgtagaagatgaggacacagaaacccaagaccccaagaaacctgaacctctcaacagcagaaggaacaaacttcactatgcatttcagctctatgacctggatcgcgatgggaagatctccaggcatgagatgctgcaggttctccgtctgatggttggggtacaggtgacagaagagcagctggagaacatcgctgaccgcacggtgcaggaggctgatgaagatggggatggggctgtgtccttcgtggagttcaccaagtccttagagaagatggacgttgagcaaaaaatgagcatccggatcctgaagtgactccgtttgtgccttgggcttgctcctgcaaccagtatctccttggaattcatccaaagcccccatggacgcatggacgcagggcgacaataaactgtattttcgtttctaactctatttagggccaagagaagaaagctggaaggatgtgtactaaagtctagctcagcagtccccaacctttttggcatcagggacagtttttccacggatgggtgacaggggatggttttgggatgattcaagtgcattacatttattgtgcactttatttctattatgattacattgtaatatataatgaaataattatacaactcaccataatgtagaatcagcaggagccctgagcttgttttcctgcaattagacggtcccatatgggagtgatgggagacagtgacagatcatcaggcattagattctcataaggagtgcacaatctagatcctttggtgtgcagttcacagtaggatttgggctcctatgataatctaatgccactgctgatctgacaggaggcagagctcaggcggtaatgcaagcaatggggagtggctgtaaatatagatgaagcttcagctcgcctgccgctcaccttgtgctgtgcagcccggttcctaacagaccacagaccccacaccaggtctatctcatttggtctcagagctgtgaatcagccagcaatattttagttgcaaatcactgaaaacccaactcaaagtgacttaagtcagaaagaaattttatgaattcaggtaattaaaaagtccagaagtatctgcctttaggcacagctggatccaagggcacaaatgatgtcatcaggctccagttattctccatctcccagctcagctttttctgtctgtaagcctgattttcaggaaggctctttcctagtgatggagatgaccaccatcagctccaggcttctatcctgctaacccagtaacccagtgggaagagatttacttattccaataattccaagtggagagtgtcattgacccgtttggggtctcatctctacttctaggggaatgaaacactttgagtggccaggcctgtgtcatgtgctaattcctagagccagggaaataaggtctgaggattcaggatggggtgaaaggtggttgcttaaaggaaaatgaaatacaattagcagaataaggggaaacgagtggtctgctctgctcgggcaaaacaagagatgcccattactgtgagggacccttgaagtctggactcttaaatgggtttttgctgatttcctgggtgcatgctaggatgatggggcttgatgcagtagggaagagacgatgtaaaaataataaacaatatataccttcaaaaaaaaaaaaaaaaaaaaaaaaa

SEQ ID NO: 75 - DNA, 2863 bp, Homo sapiens
atctgaaaaattaataattccttaattatcaaatatccattatttaaatttataattgtgtcataaatattgtcataaatagatttgctgttttaaagcttgttccttcattttctctgttttgttttagataaacattgtcataaatagatttgttgttttaaagcttgttccttcattttctctgattgttttgttttagattcagaggttacttatgcttgtttgttacatggatgttacatgtgtaatgggggatattggacttctagtgtactcatcacccatatactgaacactgtactcaaaagggattgaaagaaactaggaaacttggcaggaagatcattcttaagccaggaaaaaaatttttaatgctcacatgtgaacatgtgatggtcataccagaaggagcacccacctccctccctctgtgacagacacattttcttagccttcacctttccttctttcaagttgctgaaaatccacagtgtttctgttcatttgttactttcattctcacctatcttctctcttgctccatctaccagaacaataattccccatataatacttctcacttcacttttcaacgcaggacctcttgttggtctgatctgtttgtctgtccgctttatcaatattatcagatgtaagtttacatgaatacacacacatattcactaaactgaggggaaaaaatgccttgtaggtcataaaaaagcagggaaattcccaacaattcatatttgatccctggatccaggggtggcagcaataagcctgctttagatatttactccccattttatgatccggtggtttggtttttcaaatgatgatatggctcctttcgcaatgacttgatgtttaggaggtgtgcttcaataaatacattttaaaatcaacaatcaagttagagttgtacaaatggctctgaaatgtcccactacactgttagaccaagggcacagattgtgcttctgtactatttatcctagtatccctcggcatatattaactgctctaaaaatctccttggctacacgctgcatcaaatcaaagttaaatgttataccacctttctattctatttttaatattcaaagagggtgctcagattttagaacaaatttcaatgtttaagtacacacaaaaaaatcattaactcatatatttcaagagtaggaaatgggaactggtgttaaaactcttataacaaatgtcactgtcttaagggacagtgtttaaaaacgcatacctggccgggcgcggtggctcatgcctgtaatcccagcactttgggaggccgaggccggcggatcacaaggaaaacaaactcaggaagaaaaaggaaagcagaagtgatcaaggagagcgctcgagttgcaatattttcctttggctgctgacaggcagttactataaagcattgtgcatggacaccatcttcttgtattatacaagaaaggagtgtacctatcacacacagggggaaaaatgctcttttgggtgctaggcctcctaatcctctgtggttttctgtggactcgtaaaggaaaactaaagattgaagacatcactgataagtacatttttatcactggatgtgactcgggctttggaaacttggcagccagaacttttgataaaaagggatttcatgtaatcgctgcctgtctgactgaatcaggatcaacagctttaaaggcagaaacctcagagagacttcgtactgtgcttctggatgtgaccgacccagagaatgtcaagaggactgcccagtgggtgaagaaccaagttggggagaaaggtctctggggtctgatcaataatgctggtgttcccggcgtgctggctcccactgactggctgacactagaggactacagagaacctattgaagtgaacctgtttggactcatcagtgtgacactaaatatgcttcctttggtcaagaaagctcaagggagagttattaatgtctccagtgttggaggtcgccttgcaatcgttggagggggctatactccatccaaatatgcagtggaaggtttcaatgacagcttaagacgggacatgaaagcttttggtgtgcacgtctcatgcattgaaccaggattgttcaaaacaaacttggcagatccagtaaaggtaattgaaaaaaaactcgccatttgggagcagctgtctccagacatcaaacaacaatatggagaaggttacattgaaaaaagtctagacaaactgaaaggcaataaatcctatgtgaacatggacctctctccggtggtagagtgcatggaccacgctctaacaagtctcttccctaagactcattatgccgctggaaaagatgccaaaattttctggatacctctgtctcacatgccagcagctttgcaagactttttattgttgaaacagaaagcagagctggctaatcccaaggcagtgtgactcagctaaccacaaatgtctcctccaggctatgaaattggccgatttcaagaacacatctccttttcaaccccattccttatctgctccaacctggactcatttagatcgtgcttatttggattgcaaaagggagtcccaccatcgctggtggtatcccagggtccctgctcaagttttctttgaaaaggagggctggaatggtacatcacataggcaagtcctgccctgtatttaggctttgcctgcttggtgtgatgtaagggaaattgaaagacttgcccattcaaaatgatctttaccgtggcctgccccatgcttatggtccccagcatttacagtaacttgtgaatgttaagtatcatctcttatctaaatattaaaagataagtcaaacatt

SEQ ID NO: 76 - DNA, 603 bp, Homo sapiens
atggggcaggagtttagctgggaggaggcggaggcagctggcgagatagatgtggcggagctccaggagtggtacaagaagtttgtgatggagtgccccagcggcacactctttatgcatgagtttaagcgcttcttcaaggtcacagacgatgaggaggcctcccagtatgtagagggcatgttccgagccttcgacaagaatggggacaacaccatcgacttcctggagtacgtggcagctctgaatctcgtgctgaggggcaccctggagcacaagctgaagtggacattcaagatctatgataaggatggcaatggctgcatcgaccgcctggagctactcaacattgtggagggaatttaccagctgaagaaagcctgccggcgagagctacagactgagcaagaccagctgctcacacccgaggaggtcgtggacaggatcttcctcctggtggatgagaatggagatggccagctgtctctgaacgagtttgttgaaggtgcccgtcgggacaagtgggtgatgaagatgctgcagatggacatgaatcccagcagctggctcgctcagcagagacggaaaagtgccatgttctga

SEQ ID NO: 77 - DNA, 2407 bp, Homo sapiens
ggcacgaggcggagggggctcagtccgcagccgccgccgccaccgccgcgcctcggcctcggtgcaggcagcggccgccgccgccgagacagctgcgcgggcgagcatccccacgcagcaccttggaagttgttttcaaccatatccagcctttgccgaatacatcctatctgccacacatccagcgtgaggtccctccagctacaaggtgggcaccatggcggagaagtttgactgccactactgcagggatcccttgcaggggaagaagtatgtgcaaaaggatggccaccactgctgcctgaaatgctttgacaagttctgtgccaacacctgtgtggaatgccgcaagcccatcggtgcggactccaaggaggtgcactataagaaccgcttctggcatgacacctgcttccgctgtgccaagtgccttcaccccttggccaatgagacctttgtggccaaggacaacaagatcctgtgcaacaagtgcaccactcgggaggactcccccaagtgcaaggggtgcttcaaggccattgtggcaggagatcaaaacgtggagtacaaggggaccgtctggcacaaagactgcttcacctgtagtaactgcaagcaagtcatcgggactggaagcttcttccctaaaggggaggacttctactgcgtgacttgccatgagaccaagtttgccaagcattgcgtgaagtgcaacaaggccatcacatctggaggaatcacttaccaggatcagccctggcatgccgattgctttgtgtgtgttacctgctctaagaagctggctgggcagcgtttcaccgctgtggaggaccagtattactgcgtggattgctacaagaactttgtggccaagaagtgtgctggatgcaagaaccccatcactgggtttggtaaaggctccagtgtggtggcctatgaaggacaatcctggcacgactactgcttccactgcaaaaaatgctccgtgaatctggccaacaagcgctttgttttccaccaggagcaagtgtattgtcccgactgtgccaaaaagctgtaaactgacaggggctcctgtcctgtaaaatggcatttgaatctcgttctttgtgtccttactttctgccctataccatcaataggggaagagtggtccttcccttctttaaagttctccttccgtcttttctcccattttacagtattactcaaataagggcacacagtgatcatattagcatttagcaaaaagcaaccctgcagcaaagtgaatttctgtccggctgcaatttaaaaatgaaaacttaggtagattgactcttctgcatgtttctcatagagcagaaaagtgctaatcatttagccacttagtgatgtaagcaagaagcataggagataaaacccccactgagatgcctctcatgcctcagctgggacccaccgtgtagacacacgacatgcaagagttgcagcggctgctccaactcactgctcaccctcttctgtgagcaggaaaagaaccctactgacatgcatggtttaacttcctcatcagaactctgcccttccttctgttcttttgtgctttcaaataactaacacgaacttccagaaaattaacatttgaacttagctgtaattctaaactgacctttccccgtactaacgtttggtttccccgtgtggcatgttttctgagcgttcctactttaaagcatggaacatgcaggtgatttgggaagtgtagaaagacctgagaaaacgagcctgtttcagaggaacatcgtcacaacgaatacttctggaagcttaacaaaactaaccctgctgtcctttttattgtttttaattaatatttttgttttaattgatagcaaaatagtttatgggtttggaaacttgcatgaaaatattttagccccctcagatgttcctgcagtgctgaaattcatcctacggaagtaaccgcaaaactctagagggggagttgagcaggcgccagggctgtcatcaacatggatatgacatttcacaacagtgactagttgaatcccttgtaacgtagtagttgtctgctctttgtccatgtgttaatgaggactgcaaagtcccttctgttgtgattcctaggacttttcctcaagaggaaatctggatttccacctaccgcttacctgaaatgcaggatcacctacttactgtattctacattattatatgacatagtataatgagacaatatcaaaagtaaacatgtaatgacaatacatactaacattcttgtaggagtggttagagaagctgatgcctcatttctacattctgtcattagctattatcatctaacgtttcagtgtatccttacagaaataaagcagcatatgaaaaaaaaaaaaaaaaaaaaaaa

SEQ ID NO: 78 - DNA, 2175 bp, Homo sapiens
gagaaattggagaagataaaactggacactggggagaccacaacttcatgctgcgtgggatctcccagctacctgcagtggccaccatgtcttgggtcctgctgcctgtactttggctcattgttcaaactcaagcaatagccataaagcaaacacctgaattaacgctccatgaaatagtttgtcctaaaaaacttcacattttacacaaaagagagatcaagaacaaccagacagaaaagcatggcaaagaggaaaggtatgaacctgaagttcaatatcagatgatcttaaatggagaagaaatcattctctccctacaaaaaaccaagcacctcctggggccagactacactgaaacattgtactcacccagaggagaggaaattaccacgaaacctgagaacatggaacactgttactataaaggaaacatcctaaatgaaaagaattctgttgccagcatcagtacttgtgacgggttgagaggatacttcacacatcatcaccaaagataccagataaaacctctgaaaagcacagacgagaaagaacatgccgtctttacatctaaccaggaggaacaagacccagctaaccacacatgtggtgtgaagagcactgacgggaaacaaggcccaattcgaatctctagatcactcaaaagcccagagaaagaagactttcttcgggcacagaaatacattgatctctatttggtgctggataatgccttttataagaactataatgagaatctaactctgataagaagctttgtgtttgatgtgatgaacctactcaatgtgatatataacaccatagatgttcaagtggccttggtaggtatggaaatctggtctgatggggataagataaaggtggtgcccagcgcaagcaccacgtttgacaacttcctgagatggcacagttctaacctggggaaaaagatccacgaccatgctcagcttctcagcgggattagcttcaacaatcgacgtgtgggactggcagcttcaaattccttgtgttccccatcttcggttgctgttattgaggctaaaaaaaagaataatgtggctcttgtaggagtgatgtcacatgagctgggccatgtccttggtatgcctgatgttccattcaacaccaagtgtccctctggcagttgtgtgatgaatcagtatctgagttcaaaattcccaaaggatttcagtacatcttgccgtgcacattttgaaagataccttttatctcagaaaccaaagtgcctgctgcaagcacctattcctacaaatataatgacaacaccagtgtgtgggaaccaccttctagaagtgggagaagactgtgattgtggctctcctaaggagtgtaccaatctctgctgtgaagccctaacgtgtaaactgaagcctggaactgattgcggaggagatgctccaaaccataccacagagtgaatccaaaagtctgcttcactgagatgctaccttgccaggacaagaaccaagaactctaactgtcccaggaatcttgtgaattttcacccataatggtctttcacttgtcattctactttctatattgttatcagtccaggaaacaggtaaacagatgtaattagagacattggctctttgtttaggcctaatctttctttttacttttttttttcttttttctttttttttaaagatcatgaatttgtgacttagttctgccctttggagaacaaaagaaagcagtcttccatcaaatcaccttaaaatgcacggctaaactattcagagttaacactccagaattgttaaattacaagtactatgctttaatgcttctttcatcttactagtatggcctataaaaaaaataataccacttgatgggtgaaggctttggcaatagaaagaagaatagaattcaggttttatgttattcctctgtgttcacttcgccttgctcttgaaagtgcagtatttttctacatcatgtcgagaatgattcaatgtaaatatttttcattttatcatgtatatcctatacacacatctccttcatcatcatatatgaagtttattttgagaagtctacattgcttacattttaattgagccagcaaagaaggcttaatgatttattgaaccataatgtcaataaaaacacaacttttgaggc

SEQ ID NO: 79 - DNA, 386 bp, Homo sapiens
ccaggatcagcatggccgtccgccagtgggtaatcgccctggccttggctgccctccttgttgtggacagggaagtgccagtggcagcaggaaagctccctttctcaagaatgcccatctgtgaacacatggtagagtctccaacctgttcccagatgtccaacctggtctgcggcactgatgggctcacatatacgaatgaatgccagctctgcttggcccggataaaaaccaaacaggacatccagatcatgaaagatggcaaatgctgatcccacaggagcacctcaagccatgaagtgtcagctggagaacagtggtgggcatggagaggatatgacatgaaataaaagatccagcccaactgaaaaaaaaaaaaaaaaaaa

SEQ ID NO: 80 - DNA, 1264 bp, Homo sapiens
gtggtacccagtcctcaggtgcaaccccctgcgtggtcctctgtggcagccttctctcattcagagctgttttccacagaggtagtgaaaagaactggattttcaagttcactttgcaagagaaaaagaaaactcagtagaagataatggcaagtccagactggggatatgatgacaaaaatggtcctgaacaatggagcaagctgtatcccattgccaatggaaataaccaatcccctgttgatattaaaaccagtgaaaccaaacatgacacctctctgaaacctattagtgtctcctacaacccagccacagccaaagaaattatcaatgtggggcattctttccatgtaaattttgaggacaacgataaccgatcagtgctgaaaggtggtcctttctctgacagctacaggctctttcagtttcattttcactggggcagtacaaatgagcatggttcagaacatacagtggatggagtcaaatattctgccgagcttcacgtagctcactggaattctgcaaagtactccagccttgctgaagctgcctcaaaggctgatggtttggcagttattggtgttttgatgaaggttggtgaggccaacccaaagctgcagaaagtacttgatgccctccaagcaattaaaaccaagggcaaacgagccccattcacaaattttgacccctctactctccttccttcatccctggatttctggacctaccctggctctctgactcatcctcctctttatgagagtgtaacttggatcatctgtaaggagagcatcagtgtcagctcagagcagctggcacaattccgcagccttctatcaaatgttgaaggtgataacgctgtccccatgcagcacaacaaccgcccaacccaacctctgaagggcagaacagtgagagcttcattttgatgattctgagaagaaacttgtccttcctcaagaacacagccctgcttctgacataatccagttaaaataataatttttaagaaataaatttatttcaatattagcaagacagcatgccttcaaatcaatctgtaaaactaagaaacttaaattttagttcttactgcttaattcaaataataattagtaagctagcaaatagtaatctgtaagcataagcttatcttaaattcaagtttagtttgaggaattctttaaaattacaactaagtgatttgtatgtctatttttttcagtttatttgaaccaataaaataattttatctctttct

SEQ ID NO: 81 - DNA, 2386 bp, Homo sapiens
agcatacgccgagccggtctttgagcgctaacgtctttctgtctccccgcggtggtgatgacggtgaaaactgaggctgctaagggcaccctcacttactccaggatgaggggcatggtggcaattctcatcgctttcatgaagcagaggaggatgggtctgaacgactttattcagaagattgccaataactcctatgcatgcaaacaccctgaagttcagtccatcttgaagatctcccaacctcaggagcctgagcttatgaatgccaacccttctcctccaccaagtccttctcagcaaatcaaccttggcccgtcgtccaatcctcatgctaaaccatctgactttcacttcttgaaagtgatcggaaagggcagttttggaaaggttcttctagcaagacacaaggcagaagaagtgttctatgcagtcaaagttttacagaagaaagcaatcctgaaaaagaaagaggagaagcatattatgtcggagcggaatgttctgttgaagaatgtgaagcaccctttcctggtgggccttcacttctctttccagactgctgacaaattgtactttgtcctagactacattaatggtggagagttgttctaccatctccagagggaacgctgcttcctggaaccacgggctcgtttctatgctgctgaaatagccagtgccttgggctacctgcattcactgaacatcgtttatagagacttaaaaccagagaatattttgctagattcacagggacacattgtccttactgacttcggactctgcaaggagaacattgaacacaacagcacaacatccaccttctgtggcacgccggagtatctcgcacctgaggtgcttcataagcagccttatgacaggactgtggactggtggtgcctgggagctgtcttgtatgagatgctgtatggcctgccgcctttttatagccgaaacacagctgaaatgtacgacaacattctgaacaagcctctccagctgaaaccaaatattacaaattccgcaagacacctcctggagggcctcctgcagaaggacaggacaaagcggctcggggccaaggatgacttcatggagattaagagtcatgtcttcttctccttaattaactgggatgatctcattaataagaagattactcccccttttaacccaaatgtgagtgggcccaacgacctacggcactttgaccccgagtttaccgaagagcctgtccccaactccattggcaagtcccctgacagcgtcctcgtcacagccagcgtcaaggaagctgccgaggctttcctaggcttttcctatgcgcctcccacggactctttcctctgaaccctgttagggcttggttttaaaggattttatgtgtgtttccgaatgttttagttagccttttggtggagccgccagctgacaggacatcttacaagagaatttgcacatctctggaagcttagcaatcttattgcacactgttcgctggaagctttttgaagagcacattctcctcagtgagctcatgaggttttcatttttattcttccttccaacgtggtgctatctctgaaacgagcgttagagtgccgccttagacggaggcaggagtttcgttagaaagcggacgctgttctaaaaaaggtctcctgcagatctgtctgggctgtgatgacgaatattatgaaatgtgccttttctgaagagattgtgttagctccaaagcttttcctatcgcagtgtttcagttctttattttcccttgtggatatgctgtgtgaaccgtcgtgtgagtgtggtatgcctgatcacagatggattttgttataagcatcaatgtgacacttgcaggacactacaacgtgggacattgtttgtttcttccatatttggaagataaatttatgtgtagacttttttgtaagatacggttaataactaaaatttattgaaatggtcttgcaatgactcgtattcagatgcttaaagaaagcattgctgctacaaatatttctatttttagaaagggtttttatggaccaatgccccagttgtcagtcagagccgttggtgtttttcattgtttaaaatgtcacctgtaaaatgggcattatttatgtttttttttttgcattcctgataattgtatgtattgtataaagaacgtctgtacattgggttataacactagtatatttaaacttacaggcttatttgtaatgtaaaccaccattttaatgtactgtaattaacatggttataatacgtacaatccttccctcatcccatcacacaactttttttgtgtgtgataaactgattttggtttgcaataaaaccttgaaaaatatttacaaaaaaaaaaaaaaaa

SEQ ID NO: 82 - DNA, 1432 bp, Homo sapiens
gctgttcggcctgcgtcgctccgggagctgccgacggacggagcgcccccgcccccgcccggccgcccgcccgccgccgccatgcccttctccaacagccacaacgcactgaagctgcgcttcccggccgaggacgagttccccgacctgagcgcccacaacaaccacatggccaaggtgctgacccccgagctgtacgcggagctgcgcgccaagagcacgccgagcggcttcacgctggacgacgtcatccagacaggcgtggacaacccgggccacccgtacatcatgaccgtgggctgcgtggcgggcgacgaggagtcctacgaagtgttcaaggatctcttcgaccccatcatcgaggaccggcacggcggctacaagcccagcgatgagcacaagaccgacctcaaccccgacaacctgcagggcggcgacgacctggaccccaactacgtgctgagctcgcgggtgcgcacgggccgcagcatccgtggcttctgcctccccccgcactgcagccgcggggagcgccgcgccatcgagaagctcgcggtggaagccctgtccagcctggacggcgacctggcgggccgatactacgcgctcaagagcatgacggaggcggagcagcagcagctcatcgacgaccacttcctcttcgacaagcccgtgtcgcccctgctgctggcctcgggcatggcccgcgactggcccgacgcccgcggtatctggcacaatgacaataagaccttcctggtgtgggtcaacgaggaggaccacctgcgggtcatctccatgcagaaggggggcaacatgaaggaggtgttcacccgcttctgcaccggcctcacccagattgaaactctcttcaagtctaaggactatgagttcatgtggaaccctcacctgggctacatcctcacctgcccatccaacctgggcaccgggctgcgggcaggtgtgcatatcaagctgcccaacctgggcaagcatgagaagttctcggaggtgcttaagcggctgcgacttcagaagcgaggcacaggcggtgtggacacggctgcggtgggcggggtcttcgacgtctccaacgctgaccgcctgggcttctcagaggtggagctggtgcagatggtggtggacggagtgaagctgctcatcgagatggagcagcggctggagcagggccaggccatcgacgacctcatgcctgcccagaaatgaagcccggcccacacccgacaccagccctgctgcttcctaacttattgcctgggcagtgcccaccatgcacccctgatgttcgccgtctggcgagcccttagccttgctgtagagacttccgtcacccttggtagagtttatttttttgatggctaagatactgctgatgctgaaataaactagggttttggcctgcctgcgtctg

SEQ ID NO: 83 - DNA, 2832 bp, Homo sapiens
aggaagctgaaccatctatctccagaaatgtcttcagaaagtaaagagcaacataacgtttcacccagagactcagctgaaggaaatgacagttatccatctgggatccatctggaacttcaaagggaatcaagtactgacttcaagcaatttgagaccaatgatcaatgcagaccttatcataggatccttattgagcgtcaagagaaatcagatacaaacttcaaggagtttgttattaaaaagctgcagaagaattgccagtgcagtccagccaaagccaaaaatatgattttaggtttccttcctgttttgcagtggctcccaaaatacgacctaaagaaaaacattttaggggatgtgatgtcaggcttgattgtgggcatattattggtgccccagtccattgcttattccctgctggctggccaagaacctgtctatggtctgtacacatctttttttgccagcatcatttattttctcttgggtacctcccgtcacatctctgtgggcatttttggagtactgtgccttatgattggtgagacagttgaccgagaactacagaaagctggctatgacaatgcccatagtgctccttccttaggaatggtttcaaatgggagcacattattaaatcatacatcagacaggatatgtgacaaaagttgctatgcaattatggttggcagcactgtaacctttatagctggagtttatcaggtagcgatgggcttctttcaagtgggttttgtttctgtctacctctcagatgccttgctgagtggatttgtcactggtgcctccttcactattcttacatctcaggccaagtatcttcttgggctcaaccttcctcggactaatggtgtgggctcactcatcactacctggatacatgtcttcagaaacatccataagaccaatctctgtgatcttatcaccagccttttgtgccttttggttcttttgccaaccaaagaactcaatgaacacttcaaatccaagcttaaggcaccgattcctattgaacttgttgttgttgtagcagccacattagcctctcattttggaaaactacatgaaaattataattctagtattgctggacatattcccactgggtttatgccacccaaagtaccagaatggaacctaattcctagtgtggctgtagatgcaatagctatttccatcattggttttgctatcactgtatcactttctgagatgtttgccaagaaacatggttacacagtcaaagcaaaccaggaaatgtatgccattggcttttgtaatatcatcccttccttcttccactgttttactactagtgcagctcttgcaaagacattggttaaagaatcaacaggctgccatactcagctttctggtgtggtaacagccctggttcttttgttggtcctcctagtaatagctcctttgttctattcccttcaaaaaagtgtccttggtgtgatcacaattgtaaatctacggggagcccttcgtaaatttagggatcttcccaaaatgtggagtattagtagaatggatacagttatctggtttgttactatgctgtcctctgcactgctaagtactgaaataggcctacttgttggggtttgtttttctatattttgtgtcatcctccgcactcagaagccaaagagttcactgcttggcttggtggaagagtctgaggtctttgaatctgtgtctgcttacaagaaccttcagactaagccaggcatcaagattttccgctttgtagcccctctctactacataaacaaagaatgctttaaatctgctttatacaaacaaactgtcaacccaatcttaataaaggtggcttggaagaaggcagcaaagagaaagatcaaagaaaaagtagtgactcttggtggaatccaggatgaaatgtcagtgcaactttcccatgatcccttggagctgcatactatagtgattgactgcagtgcaattcaatttttagatacagcagggatccacacactgaaagaagttcgcagagattatgaagccattggaatccaggttctgctggctcagtgcaatcccactgtgagggattccctaaccaacggagaatattgcaaaaaggaagaagaaaaccttctcttctatagtgtgtatgaagcgatggcttttgcagaagtatctaaaaatcagaaaggagtatgtgttcccaatggtctgagtcttagtagtgattaattgagaaggtagatagaagaatgtctagccaataggttaaaatttcaagtgtccaacatttcccagttccacagtgggaaattttgcacacttgaaattttaaccaagtggctagatattattcctcctttgaagctaatggcatttgtatatacacactgcagcagagcttgtagctggacagagtcaaaaagaagaaaatacggtttcaggctttcttgcagatatgaagtattcttggaatgcaataagtatgtattgaactgtactgtaaagtagctccaaaacttaattactctcctgttttaggggttatacatttggactgtgcattctccaagagatgaagcggtgaagttgggatttacattggaagtgctgtagacttctttatgtggctcagtggagagagggaaagaatgttgcacctgctctagtaccataggtcaagaggcttctggatcacaaagtcataactagacaggtttgttcttgtagttttctatccccagtctttgctccccagatggcagtagtttttagtaggaaagtgccattcctgtccttaaggcacagtctcatcag

SEQ ID NO: 84 - DNA, 3347 bp, Homo sapiens
atcccttggaggcattcatggctgaagtggaggatcaggcagctagagacatgaagaggcttgaagaaaaggacaaggaaagaaaaaacgtaaagggtattcgagatgacattgaagaggaagatgaccaagaagcttattttcgatacatggcagaaaacccaactgctggtgtggttcaggaggaagaggaagacaatctagaatatgatagtgacggaaatccaattgcacctaccaaaaaaatcattgatcctcttccccccattgatcattcagagattgactatccaccatttgaaaaaaacttttacaatgagcatgaagagataaccaacctcactccacagcagttaatagatctccggcataagctcaatcttcgggtctctggtgctgcacctcctagaccaggaagtagctttgctcattttgggtttgacgaacaacttatgcaccagattcggaaatctgaatacacacagcccactccaatacagtgccagggtgtgcctgtggcattaagtggtagagacatgattggtattgccaaaacaggtagtgggaaaactgcagccttcatttggcccatgttgattcatataatggaccagaaggagttggaaccaggtgatggaccaattgcagtgattgtgtgtcctaccagggagctttgccagcagatccatgcagaatgtaagcggtttggaaaagcatataatcttcgatcagtggccgtatatggaggagggagtatgtgggagcaggccaaggcccttcaggagggggcagagattgttgtgtgtaccccaggtcgactgatagatcatgtgaaaaagaaagctaccaatcttcaaagagtctcttaccttgtgtttgatgaagcagatcgaatgtttgacatgggatttgagtaccaagttcgatccatagcaagtcatgttcgtcctgacaggcagactctcttatttagtgcaacttttcggaagaagattgaaaagttggccagagacatcctgatcgaccctattcgagtggtgcagggagatattggagaggcaaatgaagatgtgacacagattgtggagattctccattctggacctagtaaatggaactggcttacccggcgtctggtagaatttacctcttcagggagtgtcctcctctttgttactaaaaaagccaatgctgaagagctagcgaataaccttaaacaggagggtcataatcttgggctgctccatggggatatggatcagagtgagagaaacaaggtcatttcagactttaagaaaaaggacatcccagtcctggtggccacagatgttgcagcccgtggtctggacattccttcaattaagactgtcattaactatgatgtggcacgagacattgatacccacacgcataggattggccgcacaggaagagcgggtgagaaaggtgtggcctataccctactcactcccaaggacagcaattttgctggtgacctggtccggaacttggaaggagccaatcaacacgtttctaaggaactcctagatctggcaatgcagaatgcctggtttcggaaatctcgattcaaaggagggaaaggaaaaaagctgaacattggtggaggaggcctaggctacagggagcggcctggcctgggctctgagaacatggatcgaggaaataacaatgtaatgagcaattatgaggcctacaagccttccacaggagctatgggagatcgactaacggcaatgaaagcagctttccagtcacagtacaagagtcactttgttgcagccagtttaagtaatcagaaggctggaagttctgctgctggggcaagtgggtggactagtgcagggagcttgaattctgttccaactaactcagcacaacagggccataacagtcctgacagccccgtcaccagtgccgccaagggcatcccaggctttggcaatactggcaacatcagtggtgcccctgtgacctacccgtctgccggagcccaaggagtcaacaacacagcttcagggaataacagccgagaagggactgggggcagcaacgggaaaagagagagatatactgagaaccggggcagcagcccgtcacagtcacggagagactggcaatcggcatagcgatagtccacgtcacggagatggtggtcgccatggagatggataccgccatccagaaagcagcagccgtcatactgatggccatcggcacggggagaacagacatggaggaagcgcaggccggcatggggagaaccggggtgcaaatgatggtcggaatggggaaagcaggaaagaagcttttaatcgtgagagcaagatggagcccaagatggaacccaaagtggacagcagcaagatggacaaggtggacagcaagacagataagacagctgacggctttgctgtcccagagccgcctaaacgcaagaaaagtcgatgggacagttagaggggatgtgctaaagcgtgaaatcagttgtccttaatttttagaaagattttggtaactaggtgtctcagggctgggttggggtccaaagtgtaaggaccccctgcccttagtggagagctggagcttggagacattaccccttcatcagaaggaattttcggatgttttcttgggaagctgttttggtccttggaagcagtgagagctgggaagcttcttttggctctaggtgagttgtcatgtgggtaagttgaggttatcttgggataaagggtcttctagggcacaaaactcactctaggtttatattgtatgtagcttatattttttactaaggtgtcaccttataagcatctataaattgacttctttttcttagttgtatggccaggcagtccccattttaggagttggcttctgcaaattcaatccattgagctaactgttggggagcaatttggtagttgtagacatttgcagggaagggagatgtctgattctaaatgggagttgatgctcaggtccccagccaggtttgcatccagccctgagacatgtaggaaacacctttcagacccaggctctgaagattcccagaagccacaaggattgaagggaaaaggtgatcctggtaactgttccaggattgctccaggtttgagatggtattgctaaatttaaaattaaacaagaaacccaacaacagcttttaaagtgtcttctatctcattgtattttttttaacttgccccaatgatagaaaagtcttttgctgaaatgattttgatgatttttgtttatcgtttataaaaaggaaaagaaatatacaaactttgacttttgtgaaaaaaaaaaaaaaaaaaaaa

SEQ ID NO: 85 - DNA, 15720 bp, Homo sapiens
caacccacaccgcccctgccagccaccatggggctgccactagcccgcctggcggctgtgtgcctggccctgtctttggcagggggctcggagctccagacagagggcagaacccgataccacggccgcaacgtctgcagcacctggggcaacttccactacaagaccttcgacggggacgtcttccgcttccccggcctctgcgactacaacttcgcctccgactgccgaggctcctacaaggaatttgctgtgcacctgaagcggggtccgggccaggctgaggcccccgccggggtggagtccatcctgctgaccatcaaggatgacaccatctacctcacccgccacctggctgtgcttaacggggccgtggtcagcaccccgcactacagccccgggctgctcattgagaagagcgatgcctacaccaaagtctactcccgcgccggcctcaccctcatgtggaaccgggaggatgcactcatgctggagctggacactaagttccggaaccacacctgtggcctctgcggggactacaacggcctgcagagctattcagaattcctctctgacggcgtgctcttcagtcccctggagtttgggaacatgcagaagatcaaccagcccgatgtggtgtgtgaggatcccgaggaggaggtggcccccgcatcctgctccgagcaccgcgccgagtgtgagaggctgctgaccgccgaggccttcgcggactgtcaggacctggtgccgctggagccgtatctgcgcgcctgccagcaggaccgctgccggtgcccgggcggtgacacctgcgtctgcagcaccgtggccgagttctcccgccagtgctcccacgccggcggccggcccgggaactggaggaccgccacgctctgccccaagacctgccccgggaacctggtgtacctggagagcggctcgccctgcatggacacctgctcacacctggaggtgagcagcctgtgcgaggagcaccgcatggacggctgtttctgcccagaaggcaccgtatatgacgacatcggggacagtggctgcgttcctgtgagccagtgccactgcaggctgcacggacacctgtacacaccgggccaggagatcaccaatgactgcgagcagtgtgtctgtaacgctggccgctgggtgtgcaaagacctgccctgccccggcacctgtgccctggaaggcggctcccacatcaccaccttcgatgggaagacgtacaccttccacggggactgctactatgtcctggccaagggtgaccacaacgattcctacgctctcctgggcgagctggccccctgtggctccacagacaagcagacctgcctgaagacggtggtgctgctggctgacaagaagaagaatgcggtggtcttcaagtccgatggcagtgtactgctcaaccagctgcaggtgaacctgccccacgtgaccgcgagcttctctgtcttccgcccgtcttcctaccacatcatggtgagcatggccattggcgtccggctgcaggtgcagctggccccagtcatgcaactctttgtgacactggaccaggcctcccaggggcaggtgcagggcctctgcgggaacttcaacggcctggaaggtgacgacttcaagacggccagcgggctggtggaggccacgggggccggctttgccaacacctggaaggcacagtcaacctgccatgacaagctggactggttggacgatccctgctccctgaacatcgagagcgccaactacgccgagcactggtgctccctcctgaagaagacagagaccccctttggcaggtgccactcggctgtggaccctgctgagtattacaagaggtgcaaatatgacacgtgtaactgtcagaacaatgaggactgcctgtgcgccgccctgtcctcctacgcgcgcgcctgcaccgccaagggcgtcatgctgtggggctggcgggagcatgtctgcaacaaggatgtgggctcctgccccaactcgcaggtcttcctgtacaacctgaccacctgccagcagacctgccgctccctctccgaggccgacagccactgtctcgagggctttgcgcctgtggacggctgcggctgccctgaccacaccttcctggacgagaagggccgctgcgtacccctggccaagtgctcctgttaccaccgcggtctctacctggaggcgggggatgtggtcgtcaggcaggaagaacgatgtgtgtgccgggatgggcggctgcactgtaggcagatccggctgatcggccagagctgcacggccccaaagatccacatggactgcagcaacctgactgcactggccacctcgaagccccgagccctcagctgccagacgctggccgccggctattaccacacagagtgtgtcagtggctgtgtgtgccccgacgggctgatggatgacggccggggtggctgcgtggtggagaaggaatgcccttgcgtccataacaacgacctgtattcttccggcgccaagatcaaggtggactgcaatacctgcacctgcaagagaggacgctgggtgtgcacccaggctgtgtgccatggcacctgctccatttacgggagtggccactacatcacctttgatgggaagtactacgactttgacggacactgctcctacgtggctgttcaggactactgcggccagaactcctcactgggctcattcagcatcatcaccgagaacgtcccctgtggcactacgggcgtcacctgctccaaggccatcaagatcttcatggggaggacggagctgaagttggaagacaagcaccgtgtggtgatccagcgtgatgagggtcaccacgtggcctacaccacgcgggaggtgggccagtacctggtggtggagtccagcacgggcatcatcgtcatctgggacaagaggaccaccgtgttcatcaagctggctccctcctacaagggcaccgtgtgtggcctgtgtgggaactttgaccaccgctccaacaacgacttcaccacgcgggaccacatggtggtgagcagcgagctggacttcgggaacagctggaaggaggcccccacctgcccagatgtgagcaccaaccccgagccctgcagcctgaacccgcaccgccgctcctgggccgagaagcagtgcagcatcctcaaaagcagcgtgttcagcatctgccacagcaaggtggaccccaagcccttctacgaggcctgtgtgcacgactcgtgctcctgtgacacgggtggggactgtgagtgcttctgctctgccgtggcctcctacgcccaggagtgtaccaaagagggggcctgcgtgttctggaggacgccggacctgtgccccatattctgcgactactacaaccctccgcatgagtgtgagtggcactatgagccatgtgggaaccggagcttcgagacctgcaggaccatcaacggcatccactccaacatctccgtgtcctacctggagggctgctacccccggtgccccaaggacaggcccatctatgaggaggatctgaagaagtgtgtcactgcagacaagtgtggctgctatgtcgaggacacccactacccacctggagcatcggttcccaccgaggagacctgcaagtcctgcgtgtgtaccaactcctcccaagtcgtctgcaggccggaggaaggaaagattcttaaccagacccaggatggcgccttctgctactgggagatctgtggccccaacgggacggtggagaagcacttcaacatctgttccattacgacacgcccgtccaccctgaccaccttcaccaccatcaccctccccaccacccccacctccttcaccactaccaccaccaccaccaccccgacctccagcacagttttatcaacaactccgaagctgtgctgcctctggtctgactggatcaatgaggaccaccccagcagtggcagcgacgacggtgaccgagaaccatttgatggggtctgcggggcccctgaggacatcgagtgcaggtcggtcaaggatccccacctcagcttggagcagcatggccagaaggtgcagtgtgatgtctctgttgggttcatttgcaagaatgaagaccagtttggaaatggaccatttggactgtgttacgactacaagatacgtgtcaattgttgctggcccatggataagtgtatcaccactcccagccctccaactaccactcccagccctccaccaaccacgacgaccacccttccaccaaccaccacccccagccctccaaccaccaccacaaccacccctccaccaaccaccacccccagccctccaataaccaccacgaccacccctctaccaaccaccactcccagccctccaataagcaccacaaccacccctccaccaaccaccactcccagccctccaaccaccactcccagccctccaaccaccactcccagccctccaacaaccaccacaaccacccctccaccaaccaccactcccagccctccaatgactacgcccatcactccaccagccagcactaccacccttccaccaaccaccactcccagccctccaacaaccaccacaaccacccctccaccaaccaccactcccagtcctccaacgactacgcccatcactccaccaaccagcactactacccttccaccaaccaccactcccagccctccaccaaccaccacaaccacccctccaccaaccaccactcccagccctccaacaaccaccactcccagtcctccaacaatcaccacaaccacccctccaccaaccaccactcccagccctccaacaacgaccacaaccacccctccaccaaccaccactcccagccctccaacgactacacccatcactccaccaaccagcactaccacccttccaccaaccaccactcccagccctccaccaaccaccacaaccacccctccaccaaccaccactcccagccctccaacaaccaccactcccagccctccaataaccaccacaaccacccctccaccaaccaccactcccagctctccaataaccaccactcccagccctccaacaaccaccatgaccaccccttcaccaaccaccacccccagctctccaataaccaccacaaccaccccttcctcaactaccactcccagccctccaccaaccaccatgaccaccccttcaccaaccaccactcccagccctccaacaaccaccatgaccacccttccaccaaccaccacttccagccctctaacaactactcctctacctccatcaataactcctcctacattttcaccattctcaacgacaacccctactaccccatgcgtgcctctctgcaattggactggctggctggattctggaaaacccaactttcacaaaccaggtggagacacagaattgattggagacgtctgtggaccaggctgggcagctaacatctcttgcagagccaccatgtatcctgatgttcccattggacagcttggacaaacagtggtgtgtgatgtctctgtggggctgatatgcaaaaatgaagaccaaaagccaggtggggtcatccctatggccttctgcctcaactacgagatcaacgttcagtgctgtgagtgtgtcacccaacccaccaccatgacaaccaccaccacagagaacccaactccgccaaccacgacacccatcaccaccaccactacggtgaccccaaccccaacacccaccggcacacagaccccaaccacgacacccatcaccaccaccactacggtgaccccaaccccaacacccaccggcacacagaccccaaccacgacacccatcaccaccaccactacggtgaccccaaccccaacacccaccggcacacagaccccaaccacgacacccatcaccaccaccactacggtgaccccaaccccaacacccaccggcacacagaccccaaccacgacacccatcaccaccaccactacggtgaccccaaccccaacacccaccggcacacagaccccaaccacgacacccatcaccaccaccactacggtgaccccaaccccaacacccaccggcacacagaccccaaccacgacacccatcaccaccaccactacggtgaccccaaccccaacacccaccggcacacagaccccaaccacgacacccatcaccaccaccactacggtgaccccaaccccaacacccaccggcacacagaccccaaccacgacacccatcaccaccaccactacggtgaccccaaccccaacacccaccggcacacagaccccaaccacgacacccatcaccaccaccactacggtgaccccaaccccaacacccaccggcacacagaccccaaccacgacacccatcaccaccaccactacggtgaccccaaccccaacacccaccggcacacagaccccaaccacgacacccatcaccaccaccactacggtgaccccaaccccaacacccaccggcacacagaccccaaccacgacacccatcaccaccaccactacggtgaccccaaccccaacacccaccggcacacagaccccaaccacgacacccatcaccaccaccactacggtgaccccaaccccaacacccaccggcacacagaccccaaccacgacacccatcaccaccaccactacggtgaccccaaccccaacacccaccggcacacagaccccaaccacgacacccatcaccaccaccactacggtgaccccaaccccaacacccaccggcacacagaccccaaccacgacacccatcaccaccaccactacggtgaccccaaccccaacacccaccggcacacagaccccaaccacgacacccatcaccaccaccactacggtgaccccaaccccaacacccaccggcacacagaccccaaccacgacacccatcaccaccaccactacggtgaccccaaccccaacacccaccggcacacagaccccaaccacgacacccatcaccaccaccactacggtgaccccaaccccaacacccaccggcacacagaccccaaccacgacacccatcaccaccaccactacggtgaccccaaccccaacacccaccggcacacagaccccaaccacgacacccatcaccaccaccactacggtgaccccaaccccaacacccaccggcacacagaccccaaccacgacacccatcaccaccaccactacggtgaccccaaccccaacacccaccggcacacagaccccaaccacgacacccatcaccaccaccactacggtgaccccaaccccaacacccaccggcacacagaccccaaccacgacacccatcaccaccaccactacggtgaccccaaccccaacacccaccggcacacagaccccaaccacgacacccatcaccaccaccactacggtgaccccaaccccaacacccaccggcacacagaccccaaccacgacacccatcaccaccaccactacggtgaccccaaccccaacacccaccggcacacagaccccaaccacgacacccatcaccaccaccactacggtgaccccaaccccaacacccaccggcacacagaccccaaccacgacacccatcaccaccaccactacggtgaccccaaccccaacacccaccggcacacagaccccaaccacgacacccatcaccaccaccactacggtgaccccaaccccaacacccaccggcacacagaccccaaccacgacacccatcaccaccaccactacggtgaccccaaccccaacacccaccggcacacagaccccaaccacgacacccatcaccaccaccactacggtgaccccaaccccaacacccaccggcacacagaccccaaccacgacacccatcaccaccaccactacggtgaccccaaccccaacacccaccggcacacagaccccaaccacgacacccatcaccaccaccactacggtgaccccaaccccaacacccaccggcacacagaccccaaccacgacacccatcaccaccaccactacggtgaccccaaccccaacacccaccggcacacagaccccaaccacgacacccatcaccaccaccactacggtgaccccaaccccaacacccaccggcacacagaccccaaccacgacacccatcaccaccaccactacggtgaccccaaccccaacacccaccggcacacagaccccaaccacgacacccatcaccaccaccactacggtgaccccaaccccaacacccaccggcacacagaccccaaccacgacacccatcaccaccaccactacggtgaccccaaccccaacacccaccggcacacagaccccaaccacgacacccatcaccaccaccactacggtgaccccaaccccaacacccaccggcacacagaccccaaccacgacacccatcaccaccaccactacggtgaccccaaccccaacacccaccggcacacagaccccaaccacgacacccatcaccaccaccactacggtgaccccaaccccaacacccaccggcacacagaccccaaccacgacacccatcaccaccaccactacggtgaccccaaccccaacacccaccggcacacagaccccaaccacgacacccatcaccaccaccactacggtgaccccaaccccaacacccaccggcacacagaccccaaccacgacacccatcaccaccaccactacggtgaccccaaccccaacacccaccggcacacagaccccaaccacgacacccatcaccaccaccactacggtgaccccaaccccaacacccaccggcacacagaccccaaccacgacacccatcaccaccaccactacggtgaccccaaccccaacacccaccggcacacagaccccaaccacgacacccatcaccaccaccactacggtgaccccaaccccaacacccaccggcacacagaccccaaccacgacacccatcaccaccaccactacggtgaccccaaccccaacacccaccggcacacagaccccaaccacgacacccatcaccaccaccactacggtgaccccaaccccaacacccaccggcacacagaccccaaccacgacacccatcaccaccaccactacggtgaccccaaccccaacacccaccggcacacagaccccaaccacgacacccatcaccaccaccactacggtgaccccaaccccaacacccaccggcacacagaccccaaccacgacacccatcaccaccaccactacggtgaccccaaccccaacacccaccggcacacagaccccaaccacgacacccatcaccaccaccactacggtgaccccaaccccaacacccaccggcacacagaccccaaccacgacacccatcaccaccaccactacggtgaccccaaccccaacacccaccggcacacagaccccaaccacgacacccatcaccaccaccactacggtgaccccaaccccaacacccaccggcacacagaccccaaccacgacacccatcaccaccaccactacggtgaccccaaccccaacacccaccggcacacagaccccaaccacgacacccatcaccaccaccactacggtgaccccaaccccaacacccaccggcacacagaccccaaccacgacacccatcaccaccaccactacggtgaccccaaccccaacacccaccggcacacagaccccaaccacgacacccatcaccaccaccactacggtgaccccaaccccaacacccaccggcacacagaccccaaccacgacacccatcaccaccaccactacggtgaccccaaccccaacacccaccggcacacagaccccaaccacgacacccatcaccaccaccactacggtgaccccaaccccaacacccaccggcacacagaccccaaccacgacacccatcaccaccaccactacggtgaccccaaccccaacacccaccggcacacagaccccaaccacgacacccatcaccaccaccactacggtgaccccaaccccaacacccaccggcacacagaccccaaccacgacacccatcaccaccaccactacggtgaccccaaccccaacacccaccggcacacagaccccaaccacgacacccatcaccaccaccactacggtgaccccaaccccaacacccaccggcacacagaccccaaccacgacacccatcaccaccaccactacggtgaccccaaccccaacacccaccggcacacagaccccaaccacgacacccatcaccaccaccactacggtgaccccaaccccaacacccaccggcacacagaccccaaccacgacacccatcaccaccaccactacggtgaccccaaccccaacacccaccggcacacagaccccaaccacgacacccatcaccaccaccactacggtgaccccaaccccaacacccaccggcacacagaccccaaccacgacacccatcaccaccaccactacggtgaccccaaccccaacacccaccggcacacagaccccaaccacgacacccatcaccaccaccactacggtgaccccaaccccaacacccaccggcacacagaccccaaccacgacacccatcaccaccaccactacggtgaccccaaccccaacacccaccggcacacagaccccaaccacgacacccatcaccaccaccactacggtgaccccaaccccaacacccaccggcacacagaccccaaccacgacacccatcaccaccaccactacggtgaccccaaccccaacacccaccggcacacagaccccaaccacgacacccatcaccaccaccactacggtgaccccaaccccaacacccaccggcacacagaccccaaccacgacacccatcaccaccaccactacggtgaccccaaccccaacacccaccggcacacagaccccaaccacgacacccatcaccaccaccactacggtgaccccaaccccaacacccaccggcacacagaccccaaccacgacacccatcaccaccaccactacggtgaccccaaccccaacacccaccggcacacagaccccaaccacgacacccatcaccaccaccactacggtgaccccaaccccaacacccaccggcacacagaccccaaccacgacacccatcaccaccaccactacggtgaccccaaccccaacacccaccggcacacagaccccaaccacgacacccatcaccaccaccactacggtgaccccaaccccaacacccaccggcacacagaccccaaccacgacacccatcaccaccaccactacggtgaccccaaccccaacacccaccggcacacagaccccaaccacgacacccatcaccaccaccactacggtgaccccaaccccaacacccaccggcacacagaccccaaccacgacacccatcaccaccaccactacggtgaccccaaccccaacacccaccggcacacagaccccaaccacgacacccatcaccaccaccactacggtgaccccaaccccaacacccaccggcacacagaccccaaccacgacacccatcaccaccaccactacggtgaccccaaccccaacacccaccggcacacagaccccaaccacgacacccatcaccaccaccactacggtgaccccaaccccaacacccaccggcacacagaccccaaccacgacacccatcaccaccaccactacggtgaccccaaccccaacacccaccggcacacagaccccaaccacgacacccatcaccaccaccactacggtgaccccaaccccaacacccaccggcacacagaccccaaccacgacacccatcaccaccaccactacggtgaccccaaccccaacacccaccggcacacagaccccaaccacgacacccatcaccaccaccactacggtgaccccaaccccaacacccaccggcacacagaccccaaccacgacacccatcaccaccaccactacggtgaccccaaccccaacacccaccggcacacagaccccaaccacgacacccatcaccaccaccactacggtgaccccaaccccaacacccaccggcacacagaccccaaccacgacacccatcaccaccaccactacggtgaccccaaccccaacacccaccggcacacagaccccaaccacgacacccatcaccaccaccactacggtgaccccaaccccaacacccaccggcacacagaccccaaccacgacacccatcaccaccaccactacggtgaccccaaccccaacacccaccggcacacagaccccaaccacgacacccatcaccaccaccactacggtgaccccaaccccaacacccaccggcacacagaccccaaccacgacacccatcaccaccaccactacggtgaccccaaccccaacacccaccggcacacagaccccaaccacgacacccatcaccaccaccactacggtgaccccaaccccaacacccaccggcacacagaccgggccccccacccacacaagcacagcaccgattgctgagttgaccacatccaatcctccgcctgagtcctcaacccctcagacctctcggtccacctcttcccctctcacggagtcaaccacccttctgagtaccctaccacctgccattgagatgaccagcacggccccaccctccacacccacggcacccacgaccacgagcggaggccacacactgtctccaccgcccagcaccaccacgtcccctccaggcacccccactcgcggtaccacgaccgggtcatcttcagcccccacccccagcactgtgcagacgaccaccaccagtgcctggaccccaacgccgaccccactctccacacccagcatcatcaggaccacaggcctgaggccctacccttcctctgtgcttatctgctgtgtcctgaacgacacctactacgcaccaggtgaggaggtgtacaacggcacatacggagacacctgttatttcgtcaactgctcactgagctgtacgttggagttctataactggtcctgcccatccacgccctccccaacacccacgccctccaagtcgacgcccacgccttccaagccatcgtccacgccctccaagccgacgcccggcaccaagccccccgagtgcccagactttgatcctcccagacaggagaacgagacttggtggctgtgcgactgcttcatggccacgtgcaagtacaacaacacggtggagatcgtgaaggtggagtgtgagccgccgcccatgcccacctgctccaacggcctccaacccgtgcgcgtcgaggaccccgacggctgctgctggcactgggagtgcgactgctactgcacgggctggggcgacccgcactatgtcaccttcgacggactctactacagctaccagggcaactgcacctacgtgctggtggaggagatcagcccctccgtggacaacttcggagtttacatcgacaactaccactgcgatcccaacgacaaggtgtcctgtccccgcaccctcatcgtgcgccacgagacccaggaggtgctgatcaagaccgtgcatatgatgcccatgcaggtgcaggtgcaggtgaacaggcaggcggtggcactgccctacaagaagtacgggctggaggtgtaccagtctggcatcaactacgtggtggacatccccgagctgggtgtcctcgtctcctacaatggcctgtccttctccgtcaggctgccctaccaccggtttggcaacaacaccaagggccagtgtggcacctgcaccaacaccacctccgacgactgcattctgcccagcggggagatcgtctccaactgtgaggctgcggctgaccagtggctggtgaacgacccctccaagccacactgcccccacagcagctccacgaccaagcgcccggccgtcactgtgcccgggggcggtaaaacgaccccacacaaggactgcaccccatctcccctctgccagctcatcaaggacagcctgtttgcccagtgccacgcactggtgcccccgcagcactactacgatgcctgcgtgttcgacagctgcttcatgccgggctcgagcctggagtgcgccagtctgcaggcctacgcagccctctgtgcccagcagaacatctgcctcgactggcggaaccacacgcatggggcctgcttggtggagtgcccatctcacagggagtaccaggcctgtggccctgcagaagagcccacgtgcaaatccagctcctcccagcagaacaacacagtcctggtggaaggctgcttctgtcctgagggcaccatgaactacgctcctggctttgatgtctgcgtgaagacctgcggctgtgtgggacctgacaatgtgcccagagagtttggggagcacttcgagttcgactgcaagaactgtgtctgcctggagggtggaagtggcatcatctgccaacccaagaggtgcagccagaagcccgttacccactgcgtggaagacggcacctacctcgccacggaggtcaaccctgccgacacctgctgcaacattaccgtctgcaagtgcaacaccagcctgtgcaaagagaagccctccgtgtgcccgctgggattcgaagtgaagagcaagatggtgcctggaaggtgctgtcccttctactggtgtgagtccaagggggtgtgtgttcacgggaatgctgagtaccagcccggttctccagtttattcctccaagtgccaggactgcgtgtgcacggacaaggtggacaacaacaccctgctcaacgtcatcgcctgcacccacgtgccctgcaacacctcctgcagccctggcttcgaactcatggaggcccccggggagtgctgtaagaagtgtgaacagacgcactgtatcatcaaacggcccgacaaccagcacgtcatcctgaagcccggggacttcaagagcgacccgaagaacaactgcacattcttcagctgcgtgaagatccacaaccagctcatctcgtccgtctccaacatcacctgccccaactttgatgccagcatttgcatcccgggctccatcacattcatgcccaatggatgctgcaagacctgcacccctcgcaatgagaccagggtgccctgctccaccgtccccgtcaccacggaggtttcgtacgccggctgcaccaagaccgtcctcatgaatcattgctccgggtcctgcgggacatttgtcatgtactcggccaaggcccaggccctggaccacagctgctcctgctgcaaagaggagaaaaccagccagcgtgaggtggtcctgagctgccccaatggcggctcgctgacacacacctacacccacatcgagagctgccagtgccaggacaccgtctgcgggctccccaccggcacctcccgccgggcccggcgctcccctaggcatctggggagcgggtgagcggggtgggcacagcccccttcactgccctcgacagctttacctcccccggaccctctgagcctcctaagctcggcttcctctcttcagatatttattgtctgagtctttgttcagtccttgctttccaataataaactcagggggacatgc

SEQ ID NO: 86 - DNA, 2058 bp, Homo sapiens
cggtttctgctgggtttctgaactgctgggtttctgcttgctcctctggagatgcagcgtctgttgactccagtgaagcgcattctgcaactgacaagagcggtgcaggaaacctccctcacacctgctcgcctgctcccagtagcccaccaaaggttttctacagcctctgctgtccccctggccaaaacagatacttggccaaaggacgtgggcatcctggccctggaggtctacttcccagcccaatatgtggaccaaactgacctggagaagtataacaatgtggaagcaggaaagtatacagtgggcttgggccagacccgtatgggcttctgctcagtccaagaggacatcaactccctgtgcctgacggtggtgcaacggctgatggagcgcatacagctcccatgggactctgtgggcaggctggaagtaggcactgagaccatcattgacaagtccaaagctgtcaaaacagtgctcatggaactcttccaggattcaggcaatactgatattgagggcatagataccaccaatgcctgctacggtggtactgcctccctcttcaatgctgccaactggatggagtccagttcctgggatggtcgttatgccatggtggtctgtggagacattgccgtctatcccagtggtaatgctcgtcccacaggtggggccggagctgtggctatgctgattggcccaaaggcccctctggccctggagcgagggctgaggggaacccatatggagaatgtgtatgacttctacaaaccaaatttggcctcggagtacccaatagtggatgggaagctttccatccagtgctacttgcgggccttggatcgatgttacacatcataccgtaaaaaaatccagaatcagtggaagcaagctggcagcgatcgacccttcacccttgacgatttacagtatatgatctttcatacacccttttgcaagatggtccagaagtctctggctcgcctgatgttcaatgacttcctgtcagccagcagtgacacacaaaccagcttatataaggggctggaggctttcggggggctaaagctggaagacacctacaccaacaaggacctggataaagcacttctaaaggcctctcaggacatgttcgacaagaaaaccaaggcttccctttacctctccactcacaatgggaacatgtacacctcatccctgtacgggtgcctggcctcgcttctgtcccaccactctgcccaagaactggctggctccaggattggtgccttctcttatggctctggtttagcagcaagtttcttttcatttcgagtatcccaggatgctgctccaggctctcccctggacaagttggtgtccagcacatcagacctgccaaaacgcctagcctcccgaaagtgtgtgtctcctgaggagttcacagaaataatgaaccaaagagagcaattctaccataaggtgaatttctccccacctggtgacacaaacagccttttcccaggtacttggtacctggagcgagtggacgagcagcatcgccgaaagtatgcccggcgtcccgtctaaaggtgttctgcagatccatggaaagcttcctgggaaacgtatgctagcagagcttctccccgtgaatcatatttttaagatcccactcttagctggtaaatgaatttgaatcgacatagtagccccataagcatcagccctgtagagtgaggagccatctctagcgggcccttcattcctctccatgctgcaatcactgtcctgggcttatggtgcctatggactaggggtcctttgtgaaagagcaagatggagcaatggagagaagacctcttcctgaatcactggactccagaaatgtgcatgcagatcagctgttgccttcaagatccagataaactttcctgtcatgtgttagaactttattattattaatattgttaaacttctgtgctgttcctgtgaatctccaaattttgtaccttgttctaagctaatatatagcaattaaaaagagagaaagagaaaaaaaaaaaaaaa

SEQ ID NO: 87 - DNA, 3311 bp, Homo sapiens
tgctaatgcttttggtacaaatggatgtggaatataattgaatattttcttgtttaaggggagcatgaagaggtgttgaggttatgtcaagcatctggcacagctgaaggcagatggaaatatttacaagtacgcaatttgagactaagatattgttatcattctcctattgaagacaagagcaatagtaaaacacatcaggtcagggggttaaagacctgtgataaaccacttccgataagttggaaacgtgtgtctatattttcatatctgtatatatataatggtaaagaaagacaccttcgtaacccgcattttccaaagagaggaatcacagggagatgtacagcaatggggccatttaagagttctgtgttcatcttgattcttcaccttctagaaggggccctgagtaattcactcattcagctgaacaacaatggctatgaaggcattgtcgttgcaatcgaccccaatgtgccagaagatgaaacactcattcaacaaataaaggacatggtgacccaggcatctctgtatctgtttgaagctacaggaaagcgattttatttcaaaaatgttgccattttgattcctgaaacatggaagacaaaggctgactatgtgagaccaaaacttgagacctacaaaaatgctgatgttctggttgctgagtctactcctccaggtaatgatgaaccctacactgagcagatgggcaactgtggagagaagggtgaaaggatccacctcactcctgatttcattgcaggaaaaaagttagctgaatatggaccacaaggtaaggcatttgtccatgagtgggctcatctacgatggggagtatttgacgagtacaataatgatgagaaattctacttatccaatggaagaatacaagcagtaagatgttcagcaggtattactggtacaaatgtagtaaagaagtgtcagggaggcagctgttacaccaaaagatgcacattcaataaagttacaggactctatgaaaaaggatgtgagtttgttctccaatcccgccagacggagaaggcttctataatgtttgcacaacatgttgattctatagttgaattctgtacagaacaaaaccacaacaaagaagctccaaacaagcaaaatcaaaaatgcaatctccgaagcacatgggaagtgatccgtgattctgaggactttaagaaaaccactcctatgacaacacagccaccaaatcccaccttctcattgctgcagattggacaaagaattgtgtgtttagtccttgacaaatctggaagcatggcgactggtaaccgcctcaatcgactgaatcaagcaggccagcttttcctgctgcagacagttgagctggggtcctgggttgggatggtgacatttgacagtgctgcccatgtacaaagtgaactcatacagataaacagtggcagtgacagggacacactcgccaaaagattacctgcagcagcttcaggagggacgtccatctgcagcgggcttcgatcggcatttactgtgattaggaagaaatatccaactgatggatctgaaattgtgctgctgacggatggggaagacaacactataagtgggtgctttaacgaggtcaaacaaagtggtgccatcatccacacagtcgctttggggccctctgcagctcaagaactagaggagctgtccaaaatgacaggaggtttacagacatatgcttcagatcaagttcagaacaatggcctcattgatgcttttggggccctttcatcaggaaatggagctgtctctcagcgctccatccagcttgagagtaagggattaaccctccagaacagccagtggatgaatggcacagtgatcgtggacagcaccgtgggaaaggacactttgtttcttatcacctggacaacgcagcctccccaaatccttctctgggatcccagtggacagaagcaaggtggctttgtagtggacaaaaacaccaaaatggcctacctccaaatcccaggcattgctaaggttggcacttggaaatacagtctgcaagcaagctcacaaaccttgaccctgactgtcacgtcccgtgcgtccaatgctaccctgcctccaattacagtgacttccaaaacgaacaaggacaccagcaaattccccagccctctggtagtttatgcaaatattcgccaaggagcctccccaattctcagggccagtgtcacagccctgattgaatcagtgaatggaaaaacagttaccttggaactactggataatggagcaggtgctgatgctactaaggatgacggtgtctactcaaggtatttcacaacttatgacacgaatggtagatacagtgtaaaagtgcgggctctgggaggagttaacgcagccagacggagagtgataccccagcagagtggagcactgtacatacctggctggattgagaatgatgaaatacaatggaatccaccaagacctgaaattaataaggatgatgttcaacacaagcaagtgtgtttcagcagaacatcctcgggaggctcatttgtggcttctgatgtcccaaatgctcccatacctgatctcttcccacctggccaaatcaccgacctgaaggcggaaattcacgggggcagtctcattaatctgacttggacagctcctggggatgattatgaccatggaacagctcacaagtatatcattcgaataagtacaagtattcttgatctcagagacaagttcaatgaatctcttcaagtgaatactactgctctcatcccaaaggaagccaactctgaggaagtctttttgtttaaaccagaaaacattacttttgaaaatggcacagatcttttcattgctattcaggctgttgataaggtcgatctgaaatcagaaatatccaacattgcacgagtatctttgtttattcctccacagactccgccagagacacctagtcctgatgaaacgtctgctccttgtcctaatattcatatcaacagcaccattcctggcattcacattttaaaaattatgtggaagtggataggagaactgcagctgtcaatagcctagggctgaatttttgtcagataaataaaataaatcattcatcctttttttgattataaaattttctaaaatgtattttagacttcctgtagggggcgatatactaaatgtatatagtacatttatactaaatgtattcctgtagggggcgatatactaaatgtattttagacttcctgtagggggcgataaaataaaatgctaaacaactgggtaaa

SEQ ID NO: 88 - DNA, 468 bp, Homo sapiens
gccccctcccctgactatcaaagcagcggccggctgttggggtccaccacgccttccacctgccccactgcttcttcgcttctctcttggaaagtccagtctctcctcggcttgcaatggaccccaactgctcctgcgccgctggtgtctcctgcacctgcgctggttcctgcaagtgcaaagagtgcaaatgcacctcctgcaagaagagctgctgctcctgctgccccgtgggctgtagcaagtgtgcccagggctgtgtttgcaaaggggcgtcagagaagtgcagctgctgcgactgatgccaggacaacctttctcccagatgtaaacagagagacatgtacaaacctggatttttttttataccaccttgacccatttgctacattccttttcctgtgaaatatgtgagtgataattaaacactttagacccaaaaaaaaaaaaaaaaaaaaaaaaaaaaaa

SEQ ID NO: 89 - DNA, 1551 bp, Homo sapiens
ggcgcccaagccgccgccgccagatcggtgccgattcctgccctgccccgaccgccagcgcgaccatgtcccatcactgggggtacggcaaacacaacggacctgagcactggcataaggacttccccattgccaagggagagcgccagtcccctgttgacatcgacactcatacagccaagtatgacccttccctgaagcccctgtctgtttcctatgatcaagcaacttccctgaggatcctcaacaatggtcatgctttcaacgtggagtttgatgactctcaggacaaagcagtgctcaagggaggacccctggatggcacttacagattgattcagtttcactttcactggggttcacttgatggacaaggttcagagcatactgtggataaaaagaaatatgctgcagaacttcacttggttcactggaacaccaaatatggggattttgggaaagctgtgcagcaacctgatggactggccgttctaggtatttttttgaaggttggcagcgctaaaccgggccttcagaaagttgttgatgtgctggattccattaaaacaaagggcaagagtgctgacttcactaacttcgatcctcgtggcctccttcctgaatccctggattactggacctacccaggctcactgaccacccctcctcttctggaatgtgtgacctggattgtgctcaaggaacccatcagcgtcagcagcgagcaggtgttgaaattccgtaaacttaacttcaatggggagggtgaacccgaagaactgatggtggacaactggcgcccagctcagccactgaagaacaggcaaatcaaagcttccttcaaataagatggtcccatagtctgtatccaaataatgaatcttcgggtgtttccctttagctaagcacagatctaccttggtgatttggaccctggttgctttgtgtctagttttctagacccttcatctcttacttgatagacttactaataaaatgtgaagactagaccaattgtcatgcttgacacaactgctgtggctggttggtgctttgtttatggtagtagtttttctgtaacacagaatataggataagaaataagaataaagtaccttgactttgttcacagcatgtagggtgatgagcactcacaattgttgactaaaatgctgcttttaaaacataggaaagtagaatggttgagtgcaaatccatagcacaagataaattgagctagttaaggcaaatcaggtaaaatagtcatgattctatgtaatgtaaaccagaaaaaataaatgttcatgatttcaagatgttatattaaagaaaaactttaaaaattattatatatttatagcaaagttatcttaaatatgaattctgttgtaatttaatgacttttgaattacagagatataaatgaagtattatctgtaaaaattgttataattagagttgtgatacagagtatatttccattcagacaatatatcataacttaataaatattgtattttagatatattctctaataaaattcagaattct

SEQ ID NO: 90 - DNA, 367 bp, Homo sapiens
ctccagtctcacctcggcttgcaatggaccccaactgctcctgcgaggctggtggctcctgcgcctgcgccggctcctgcaagtgcaaaaagtgcaaatgcacctcctgcaagaagagctgctgctcctgttgccccctgggctgtgccaagtgtgcccagggctgcatctgcaaaggggcgtcagagaagtgcagctgctgtgcctgatgtcgggacagccctgctgtcagatgaaaacagaatgacacgtaaaatccgaggttttttttttctacaactccgactcatttgctacattcctttttttctgtgaaatatgtgaataataattaaacacttagacttgaaaaaaaaaaaaaaaaaaa

SEQ ID NO: 91 - DNA, 396 bp, Homo sapiens
actccgccttccacgtgcacccactgcctcttcccttctcgcttgggaactctagtctcgcctcgggttgcaatggaccccaactgctcctgtgccgctggtgtctcctgcacctgcgccagctcctgcaagtgcaaagagtgcaaatgcacctcctgcaagaagagctgctgctcctgctgccctgtgggctgtgccaagtgtgcccaaggctgcatctgcaaaggggcatcggagaagtgcagctgctgcgcctgatgtcgggacagccctgctcccaagtacaaatagagtgacccgtaaaatctaggattttttgttttttgctacaatcttgacccctttgctacattcccttttttctgtgaaatatgtgaataataattaaacacttag

SEQ ID NO: 92 - DNA, 632 bp, Homo sapiens
cccagaatgttgacagtcgctctcctagcccttctctgtgcctcagcctctggcaatgccattcaggccaggtcttcctcctatagtggagagtatggaagtggtggtggaaagcgattctctcattctggcaaccagttggacggccccatcaccgccctccgggtccgagtcaacacatactacatcgtaggtcttcaggtgcgctatggcaaggtgtggagcgactatgtgggtggtcgcaacggagacctggaggagatctttctgcaccctggggaatcagtgatccaggtttctgggaagtacaagtggtacctgaagaagctggtatttgtgacagacaagggccgctatctgtcttttgggaaagacagtggcacaagtttcaatgccgtccccttgcaccccaacaccgtgctccgcttcatcagtggccggtctggttctctcatcgatgccattggcctgcactgggatgtttaccccactagctgcagcagatgctgagcctcctctccttggcaggggcactgtgatgaggagtaagaactcccttatcactaacccccatccaaatggctcaataaaaaaatatggttaaggctaaaaaaaaaaaaaaaaaaaaaaaa

SEQ ID NO: 93 - DNA, 257 bp, Homo sapiens
accacgcttttcatctgtcccgctgcgtgttttcctcttgatcgggaactcctgcttctccttgcctcgaaatggaccccaactgctcctgctcgcctgttggctcctgtgcctgtgccggctcctgcaaatgcaaagagtgcaaatgcacctcctgcaagaagagctgctgctcctgctgccctgtcggctgtgccaagtgtgcccagggctgcatctgcaaagggacgtcagacaagtgcagctgctgtgcctga

SEQ ID NO: 94 - protein, 422 aa, Homo sapiens
MNSGHSFSQTPSASFHGAGGGWGRPRSFPRAPTVHGGAGGARISLSFTTRSCPPPGGSWGSGRSSPLLGGNGKATMQNLNDRLASYLEKVRALEEANMKLESRILKWHQQRDPGSKKDYSQYEENITHLQEQIVDGKMTNAQIILLIDNARMAVDDFNLKYENEHSFKKDLEIEVEGLRRTLDNLTIVTTDLEQEVEGMRKELILMKKHHEQEMEKHHVPSDFNVNVKVDTGPREDLIKVLEDMRQEYELIIKKKHRDLDTWYKEQSAAMSQEAASPATVQSRQGDIHELKRTFQALEIDLQTQYSTKSALENMLSETQSRYSCKLQDMQEIISHYEEELTQLRHELERQNNEYQVLLGIKTHLEKEITTYRRLLEGESEGTREESKSSMKVSATPKIKAITQETINGRLVLCQVNEIQKHA

SEQ ID NO: 95 - protein, 166 aa, Homo sapiens
MAQTSSYFMLISCLMFLSQSQGQEAQTELPQARISCPEGTNAYRSYCYYFNEDRETWVDADLYCQNMNSGNLVSVLTQAEGAFVASLIKESGTDDFNVWIGLHDPKKNRRWHWSSGSLVSYKSWGIGAPSSVNPGYCVSLTSSTGFQKWKDVPCEDKFSFVCKFKN

SEQ ID NO: 96 - protein, 166 aa, Homo sapiens
MAQTNSFFMLISSLMFLSLSQGQESQTELPNPRISCPEGTNAYRSYCYYFNEDPETWVDADLYCQNMNSGNLVSVLTQAEGAFVASLIKESSTDDSNVWIGLHDPKKNRRWHWSSGSLVSYKSWDTGSPSSANAGYCASLTSCSGFKKWKDESCEKKFSFVCKFKN

SEQ ID NO: 97 - protein, 411 aa, Homo sapiens
MWSGWWLWPLVAVCTADFFRDEAERIMRDSPVIDGHNDLPWQLLDMFNNRLQDERANLTTLAGTHTNIPKLRAGFVGGQFWSVYTPCDTQNKDAVRRTLEQMDVVHRMCRMYPETFLYVTSSAGIRQAFREGKVASLIGVEGGHSIDSSLGVLRALYQLGMRYLTLTHSCNTPWADNWLVDTGDSEPQSQGLSPFGQRVVKELNRLGVLIDLAHVSVATMKATLQLSRAPVIFSHSSAYSVCASRRNVPDDVLRLVKQTDSLVMVNFYNNYISCTNKANLSQVADHLDHIKEVAGARAVGFGGDFDGVPRVPEGLEDVSKYPDLIAELLRRNWTEAEVKGALADNLLRVFEAVEQASNLTQAPEEEPIPLDQLGGSCRTHYGYSSGASSLHRHWGLLLASLAPLVLCLSLL

SEQ ID NO: 98 - protein, 99 aa, Homo sapiens
MTSKLAVALLAAFLISAALCEGAVLPRSAKELRCQCIKTYSKPFHPKFIKELRVIESGPHCANTEIIVKLSDGRELCLDPKENWVQRVVEKFLKRAENS

SEQ ID NO: 99 - protein, 469 aa, Homo sapiens
MHSFPPLLLLLFWGVVSHSFPATLETQEQDVDLVQKYLEKYYNLKNDGRQVEKRRNSGPVVEKLKQMQEFFGLKVTGKPDAETLKVMKQPRCGVPDVAQFVLTEGNPRWEQTHLTYRIENYTPDLPRADVDHAIEKAFQLWSNVTPLTFTKVSEGQADIMISFVRGDHRDNSPFDGPGGNLAHAFQPGPGIGGDAHFDEDERWTNNFREYNLHRVAAHELGHSLGLSHSTDIGALMYPSYTFSGDVQLAQDDIDGIQAIYGRSQNPVQPIGPQTPKACDSKLTFDAITTIRGEVMFFKDRFYMRTNPFYPEVELNFISVFWPQLPNGLEAAYEFADRDEVRFFKGNKYWAVQGQNVLHGYPKDIYSSFGFPRTVKHIDAALSEENTGKTYFFVANKYWRYDEYKRSMDPGYPKMIAHDFPGIGHKVDAVFMKDGFFYFFHGTRQYKFDPKTKRILTLQKANSWFNCRKN

SEQ ID NO: 100 - protein, 267 aa, Homo sapiens
MRLTVLCAVCLLPGSLALPLPQEAGGMSELQWEQAQDYLKRFYLYDSETKNANSLEAKLKEMQKFFGLPITGMLNSRVIEIMQKPRCGVPDVAEYSLFPNSPKWTSKVVTYRIVSYTRDLPHITVDRLVSKALNMWGKEIPLHFRKVVWGTADIMIGFARGAHGDSYPFDGPGNTLAHAFAPGTGLGGDAHFDEDERWTDGSSLGINFLYAATHELGHSLGMGHSSDPNAVMYPTYGNGDPQNFKLSQDDIKGIQKLYGKRSNSRKK

SEQ ID NO: 101 - protein, 300 aa, Homo sapiens
MRIAVICFCLLGITCAIPVKQADSGSSEEKQLYNKYPDAVATWLNPDPSQKQNLLAPQTLPSKSNESHDHMDDMDDEDDDDHVDSQDSIDSNDSDDVDDTDDSHQSDESHHSDESDELVTDFPTDLPATEVFTPVVPTVDTYDGRGDSVVYGLRSKSKKFRRPDIQYPDATDEDITSHMESEELNGAYKAIPVAQDLNAPSDWDSRGKDSYETSQLDDQSAETHSHKQSRLYKRKANDESNEHSDVIDSQELSKVSREFHSHEFHSHEDMLVVDPKSKEEDKHLKFRISHELDSASSEVN

SEQ ID NO: 102 - protein, 98 aa, Homo sapiens
MNQTAILICCLIFLTLSGIQGVPLSRTVRCTCISISNQPVNPRSLEKLEIIPASQFCPRVEIIATMKKKGEKRCLNPESKAIKNLLKAVSKEMSKRSP

SEQ ID NO: 103 - protein, 871 aa, Homo sapiens
MKYSCCALVLAVLGTELLGSLCSTVRSPRFRGRIQQERKNIRPNIILVPTDDQDVELGSLQVMNKTRKIMEHGGATFINAFVTTPMCCPSRSSMLTGKYVHNHNVYTNNENCSSPSWQAMHEPRTFAVYLNNTGYRTAFFGKYLNEYNGSYIPPGWREWLGLIKNSRFYNYTVCRNGIKEKHGFDYAKDYFTDLITNESINYFKMSKRMYPHRPVMMVISHAAPHGPEDSAPQFSKLYPNASQHITPSYNYAPNMDKHWIMQYTGPMLPIHMEFTNILQRKRLQTLMSVDDSVERLYNMLVETGELENTYIIYTADHGYHIGQFGLVKGKSMPYDFDIRVPFFIRGPSVEPGSIVPQIVLNIDLAPTILDIAGLDTPPDVDGKSVLKLLDPEKPGNRFRTNKKAKIWRDTFLVERGKFLRKKEESSKNIQQSNHLPKYERVKELCQQARYQTACEQPGQKWQCIEDTSGKLRIHKCKGPSDLLTVRQSTRNLYARGFHDKDKECSCRESGYRASRSQRKSQRQFLRNQGTPKYKPRFVHTRQTRSLSVEFEGEIYDINLEEEEELQVLQPRNIAKRHDEGHKGPRDLQASSGGNRGRMLADSSNAVGPPTTVRVTHKCFILPNDSIHCERELYQSARAWKDHKAYIDKEIEALQDKIKNLREVRGHLKRRKPEECSCSKQSYYNKEKGVKKQEKLKSHLHPFKEAAQEVDSKLQLFKENNRRRKKERKEKRRQRKGEECSLPGLTCFTHDNNHWQTAPFWNLGSFCACTSSNNNTYWCLRTVNETHNFLFCEFATGFLEYFDMNTDPYQLTNTVHTVERGILNQLHVQLMELRSCQGYKQCNPRPKNLDVGNKDGGSYDLHRGQLWDGWEG

SEQ ID NO: 104 - protein, 1496 aa, Homo sapiens
MMANWAEARPLLILIVLLGQFVSIKAQEEDEDEGYGEEIACTQNGQMYLNRDIWKPAPCQICVCDNGAILCDKIECQDVLDCADPVTPPGECCPVCSQTPGGGNTNFGRGRKGQKGEPGLVPVVTGIRGRPGPAGPPGSQGPRGERGPKGRPGPRGPQGIDGEPGVPGQPGAPGPPGHPSHPGPDGLSRPFSAQMAGLDEKSGLGSQVGLMPGSVGPVGPRGPQGLQGQQGGAGPTGPPGEPGDPGPMGPIGSRGPEGPPGKPGEDGEPGRNGNPGEVGFAGSPGARGFPGAPGLPGLKGHRGHKGLEGPKGEVGAPGSKGEAGPTGPMGAMGPLGPRGMPGERGRLGPQGAPGQRGAHGMPGKPGPMGPLGIPGSSGFPGNPGMKGEAGPTGARGPEGPQGQRGETGPPGPVGSPGLPGAIGTDGTPGPKGPTGSPGTSGPPGSAGPPGSPGPQGSTGPQGNSGLPGDPGFKGEAGPKGEPGPHGIQGPIGPPGEEGKRGPRGDPGTLGPPGPVGERGAPGNRGFPGSDGLPGPKGAQGERGPVGSSGPKGSQGDPGRPGEPGLPGARGLTGNPGVQGPEGKLGPLGAPGEDGRPGPPGSIGIKGQPGTMGLPGPKGSNGDPGKPGEAGNPGVPGQRGAPGKDGKVGPYGPPGPPGLRGERGEQGPPGPTGFQGHPGPPGPPGEGGKPGDQGVPGGPGAVGPLGPRGERGNPGERGEPGITGLPGEKGMAGGHGPDGPKGSPGPSGTPGDTGPPGLQGMPGERGIAGTPGPKGDRGGIGEKGAEGTAGNDGAGGLPGPLGPPGPAGLLGEKGEPGPRGLVGPPGSRGNPGSRGENGPTGAVGFAGPQGSDGQPGVKGEPGEPGQKGDAGSPGPQGLAGSPGPHGPNGVPGLKGGRGTQGPPGATGFPGSAGRVGPPGPAGAPGPAGPLGEPGKEGPPGPRGDPGSHGRVGVRGPAGPPGGPGDKGDPGEDGQPGPDGPPGPAGTTGQRGIVGMPGQRGERGMPGLPGPAGTPGKVGPTGATGDKGPPGPVGPPGSNGPVGEPGPEGPAGNDGTPGRDGAVGERGDRGDPGPAGLPGSQGAPGTPGPVGAPGDAGQRGDPGSRGPIGHLGRAGKRGLPGPQGPRGDKGDHGDRGDRGQKGHRGFTGLQGLPGPPGPNGEQGSAGIPGPFGPRGPPGPVGPSGKEGNPGPLGPLGPPGVRGSVGEAGPEGPPGEPGPPGPPGPPGHLTAALGDIMGHYDESMPDPLPEFTEDQAAPDDKNKTDPGVHATLKSLSSQIETMRSPDGSKKHPARTCDDLKLCHSAKQSGEYWIDPNQGSVEDAIKVYCNMETGETCISANPSSVPRKTWWASKSPDNKPVWYGLDMNRGSQFAYGDHQSPNTAITQMTFLRLLSKEASQNITYICKNSVGYMDDQAKNLKKAVVLKGANDLDIKAEGNIRFRYIVLQDTCSKRNGNVGKTVFEYRTQNVARLPIIDLAPVDVGGTDQEFGVEIGPVCFV

SEQ ID NO: 105 - protein, 107 aa, Homo sapiens
MARAALSAAPSNPRLLRVALLLLLLVAAGRRAAGASVATELRCQCLQTLQGIHPKNIQSVNVKSPGPHCAQTEVIATLKNGRKACLNPASPIVKKIIEKMLNSDKSN

SEQ ID NO: 106 - protein, 89 aa, Homo sapiens
MKGLAAALLVLVCTMALCSCAQVGTNKELCCLVYTSWQIPQKFIVDYSETSPQCPKPGVILLTKRGRQICADPNKKWVQKYISDLKLNA

SEQ ID NO: 107 - protein, 796 aa, Homo sapiens
MKENYCLQAALVCLGMLCHSHAFAPERRGHLRPSFHGHHEKGKEGQVLQRSKRGWVWNQFFVIEEYTGPDPVLVGRLHSDIDSGDGNIKYILSGEGAGTIFVIDDKSGNIHATKTLDREERAQYTLMAQAVDRDTNRPLEPPSEFIVKVQDINDNPPEFLHETYHANVPERSNVGTSVIQVTASDADDPTYGNSAKLVYSILEGQPYFSVEAQTGIIRTALPNMDREAKEEYHVVIQAKDMGGHMGGLSGTTKVTITLTDVNDNPPKFPQSVYQMSVSEAAVPGEEVGRVKAKDPDIGENGLVTYNIVDGDGMESFEITTDYETQEGVIKLKKPVDFETKRAYSLKVEAANVHIDPKFISNGPFKDTVTVKISVEDADEPPMFLAPSYIHEVQENAAAGTVVGRVHAKDPDAANSPIRYSIDRHTDLDRFFTINPEDGFIKTTKPLDREETAWLNITVFAAEIHNRHQEAKVPVAIRVLDVNDNAPKFAAPYEGFICESDQTKPLSNQPIVTISADDKDDTANGPRFIFSLPPEIIHNPNFTVRDNRDNTAGVYARRGGFSRQKQDLYLLPIVISDGGIPPMSSTNTLTIKVCGCDVNGALLSCNAEAYILNAGLSTGALIAILACIVILLVIVVLFVTLRRQKKEPLIVFEEEDVRENIITYDDEGGGEEDTEAFDIATLQNPDGINGFIPRKDIKPEYQYMPRPGLRPAPNSVDVDDFINTRIQEADNDPTAPPYDSIQIYGYEGRGSVAGSLSSLESATTDSDLDYDYLQNWGPRFKKLADLYGSKDTFDDDS

SEQ ID NO: 108 - protein, 180 aa, Homo sapiens
MASTSYDYCRVPMEDGDKRCKLLLGIGILVLLIIVILGVPLIIFTIKANSEACRDGLRAVMECRNVTHLLQQELTEAQKGFQDVEAQAATCNHTVMALMASLDAEKAQGQKKVEELEGEITTLNHKLQDASAEVERLRRENQVLSVRIADKKYYPSSQDSSSAAAPQLLIVLLGLSALLQ

SEQ ID NO: 109 - protein, 358 aa, Homo sapiens
MRATPLAAPAGSLSRKKRLELDDNLDTERPVQKRARSGPQPRLPPCLLPLSPPTAPDRATAVATASRLGPYVLLEPEEGGRAYQALHCPTGTEYTCKVYPVQEAPAVLEPYARLPPHKHVARPTEVLAGTQLLYAFFTRTHGDMHSLVRSRHRIPEPEAAVLFRQMATALAHCHQHGLVLRDLKLCRFVFADRERKKLVLENLEDSCVLTGPDDSLWDKHACPAYVGPEILSSRASYSGKAADVWSLGVALFTMLAGHYPFQDSEPVLLFGKIRRGAYALPAGLSAPARCLVRCLLRREPAERLTATGILLHPWLRQDPMPLAPTRSHLWEAAQVVPDGLGLDEAREEEGDREVVLYG

SEQ ID NO: 110 - protein, 1172 aa, Homo sapiens
MVWRLVLLALWVWPSTQAGHQDKDTTFDLFSISNINRKTIGAKQFRGPDPGVPAYRFVRFDYIPPVNADDLSKITKIMRQKEGFFLTAQLKQDGKSRGTLLALEGPGLSQRQFEIVSNGPADTLDLTYWIDGTRHVVSLEDVGLADSQWKNVTVQVAGETYSLHVGCDLIGPVALDEPFYEHLQAEKSRMYVAKGSARESHFRGLLQNVHLVFENSVEDILSKKGCQQGQGAEINAISENTETLRLGPHVTTEYVGPSSERRPEVCERSCEELGNMVQELSGLHVLVNQLSENLKRVSNDNQFLWELIGGPPKTRNMSACWQDGRFFAENETWVVDSCTTCTCKKFKTICHQITCPPATCASPSFVEGECCPSCLHSVDGEEGWSPWAEWTQCSVTCGSGTQQRGRSCDVTSNTCLGPSIQTRACSLSKCDTRIRQDGGWSHWSPWSSCSVTCGVGNITRIRLCNSPVPQMGGKNCKGSGRETKACQGAPCPIDGRWSPWSPWSACTVTCAGGIRERTRVCNSPEPQYGGKACVGDVQERQMCNKRSCPVDGCLSNPCFPGAQCSSFPDGSWSCGFCPVGFLGNGTHCEDLDECALVPDICFSTSKVPRCVNTQPGFHCLPCPPRYRGNQPVGVGLEAAKTEKQVCEPENPCKDKTHNCHKHAECIYLGHFSDPMYKCECQTGYAGDGLICGEDSDLDGWPNLNLVCATNATYHCIKDNCPHLPNSGQEDFDKDGIGDACDDDDDNDGVTDEKDNCQLLFNPRQADYDKDEVGDRCDNCPYVHNPAQIDTDNNGEGDACSVDIDGDDVFNERDNCPYVYNTDQRDTDGDGVGDHCDNCPLVHNPDQTDVDNDLVGDQCDNNEDIDDDGHQNNQDNCPYISNANQADHDRDGQGDACDPDDDNDGVPDDRDNCRLVFNPDQEDLDGDGRGDICKDDFDNDNIPDIDDVCPENNAISETDFRNFQMVPLDPKGTTQIDPNWVIRHQGKELVQTANSDPGIAVGFDEFGSVDFSGTFYVNTDRDDDYAGFVFGYQSSSRFYVVMWKQVTQTYWEDQPTRAYGYSGVSLKVVNSTTGTGEHLRNALWHTGNTPGQVRTLWHDPRNIGWKDYTAYRWHLTHRPKTGYIRVLVHEGKQVMADSGPIYDQTYAGGRLGLFVFSQEMVYFSDLKYECRDI

SEQ ID NO: 111 - protein, 138 aa, Homo sapiens
MRQKAVSLFLCYLLLFTCSGVEAGENAGKDAGKKKCSESSDSGSGFWKALTFMAVGGGLAVAGLPALGFTGAGIAANSVAASLMSWSAILNGGGVPAGGLVATLQSLGAGGSSVVIGNIGALMGYATHKYLDSEEDEE

SEQ ID NO: 112 - protein, 184 aa, Homo sapiens
MSRTAYTVGALLLLLGTLLPAAEGKKKGSQGAIPPPDKAQHNDSEQTQSPQQPGSRNRGRGQGRGTAMPGEEVLESSQEALHVTERKYLKRDWCKTQPLKQTIHEEGCNSRTIINRFCYGQCNSFYIPRHIRKEEGSFQSCSFCKPKKFTTMMVTLNCPELQPPTKKKRVTRVKQCRCISIDLD

SEQ ID NO: 113 - protein, 707 aa, Homo sapiens
MSLWQPLVLVLLVLGCCFAAPRQRQSTLVLFPGDLRTNLTDRQLAEEYLYRYGYTRVAEMRGESKSLGPALLLLQKQLSLPETGELDSATLKAMRTPRCGVPDLGRFQTFEGDLKWHHHNITYWIQNYSEDLPRAVIDDAFARAFALWSAVTPLTFTRVYSRDADIVIQFGVAEHGDGYPFDGKDGLLAHAFPPGPGIQGDAHFDDDELWSLGKGVVVPTRFGNADGAACHFPFIFEGRSYSACTTDGRSDGLPWCSTTANYDTDDRFGFCPSERLYTRDGNADGKPCQFPFIFQGQSYSACTTDGRSDGYRWCATTANYDRDKLFGFCPTRADSTVMGGNSAGELCVFPFTFLGKEYSTCTSEGRGDGRLWCATTSNFDSDKKWGFCPDQGYSLFLVAAHEFGHALGLDHSSVPEALMYPMYRFTEGPPLHKDDVNGIRHLYGPRPEPEPRPPTTTTPQPTAPPTVCPTGPPTVHPSERPTAGPTGPPSAGPTGPPTAGPSTATTVPLSPVDDACNVNIFDAIAEIGNQLYLFKDGKYWRFSEGRGSRPQGPFLIADKWPALPRKLDSVFEEPLSKKLFFFSGRQVWVYTGASVLGPRRLDKLGLGADVAQVTGALRSGRGKMLLFSGRRLWRFDVKAQMVDPRSASEVDRMFPGVPLDTHDVFQYREKAYFCQDRFYWRVSSRSELNQVDQVGYVTYDILQCPED

SEQ ID NO: 114 - protein, 194 aa, Homo sapiens
MAIRELKVCLLGDTGVGKSSIVCRFVQDHFDHNISPTIGASFMTKTVPCGNELHKFLIWDTAGQERFHSLAPMYYRGSAAAVIVYDITKQDSFYTLKKWVKELKEHGPENIVMAIAGNKCDLSDIREVPLKDAKEYAESIGAIVVETSAKNAINIEELFQGISRQIPPLDPHENGNNGTIKVEKPTMQASRRCC

SEQ ID NO: 115 - protein, 114 aa, Homo sapiens
MSALSLLILGLLTAVPPASCQQGLGNLQPWMQGLIAVAVFLVLVAIAFAVNHFWCQEEPEPAHMILTVGNKADGVLVGTDGRYSSMAASFRSSEHENAYENVPEEEGKVRSTPM

SEQ ID NO: 116 - protein, 117 aa, Homo sapiens
MALETVPKDLRHLRACLLCSLVKTIDQFEYDGCDNCDAYLQMKGNREMVYDCTSSSFDGIIAMMSPEDSWVSKWQRVSNFKPGVYAVSVTGRLPQGIVRELKSRGVAYKSRDTAIKT

SEQ ID NO: 117 - protein, 178 aa, Homo sapiens
MSPSGRLCLLTIVGLILPTRGQTLKDTTSSSSADSTIMDIQVPTRAPDAVYTELQPTSPTPTWPADETPQPQTQTQQLEGTDGPLVTDPETHKSTKAAHPTDDTTTLSERPSPSTDVQTDPQTLKPSGFHEDDPFFYDEHTLRKRGLLVAAVLFITGIIILTSGKCRQLSRLCRNRCR

SEQ ID NO: 118 - protein, 3396 aa, Homo sapiens
MFINIKSILWMCSTLIVTHALHKVKVGKSPPVRGSLSGKVSLPCHFSTMPTLPPSYNTSEFLRIKWSKIEVDKNGKDLKETTVLVAQNGNIKIGQDYKGRVSVPTHPEAVGDASLTVVKLLASDAGLYRCDVMYGIEDTQDTVSLTVDGVVFHYRAATSRYTLNFEAAQKACLDVGAVIATPEQLFAAYEDGFEQCDAGWLADQTVRYPIRAPRVGCYGDKMGKAGVRTYGFRSPQETYDVYCYVDHLDGDVFHLTVPSKFTFEEAAKECENQDARLATVGELQAAWRNGFDQCDYGWLSDASVRHPVTVARAQCGGGLLGVRTLYRFENQTGFPPPDSRFDAYCFKPKEATTIDLSILAETASPSLSKEPQMVSDRTTPIIPLVDELPVIPTEFPPVGNIVSFEQKATVQPQAITDSLATKLPTPTGSTKKPWDMDDYSPSASGPLGKLDISEIKEEVLQSTTGVSHYATDSWDGVVEDKQTQESVTQIEQIEVGPLVTSMEILKHIPSKEFPVTETPLVTARMILESKTEKKMVSTVSELVTTGHYGFTLGEEDDEDRTLTVGSDESTLIFDQIPEVITVSKTSEDTIHTHLEDLESVSASTTVSPLIMPDNNGSSMDDWEERQTSGRITEEFLGKYLSTTPFPSQHRTEIELFPYSGDKILVEGISTVIYPSLQTEMTHRRERTETLIPEMRTDTYTDEIQEEITKSPFMGKTEEEVFSGMKLSTSLSEPIHVTESSVEMTKSFDFPTLITKLSAEPTEVRDMEEDFTATPGTTKYDENITTVLLAHGTLSVEAATVSKWSWDEDNTTSKPLESTEPSASSKLPPALLTTVGMNGKDKDIPSFTEDGADEFTLIPDSTQKQLEEVTDEDIAAHGKFTIRFQPTTSTGIAEKSTLRDSTTEEKVPPITSTEGQVYATMEGSALGEVEDVDLSKPVSTVPQFAHTSEVEGLAFVSYSSTQEPTTYVDSSHTIPLSVIPKTDWGVLVPSVPSEDEVLGEPSQDILVIDQTRLEATISPETMRTTKITEGTTQEEFPWKEQTAEKPVPALSSTAWTPKEAVTPLDEQEGDGSAYTVSEDELLTGSERVPVLETTPVGKIDHSVSYPPGAVTEHKVKTDEVVTLTPRIGPKVSLSPGPEQKYETEGSSTTGFTSSLSPFSTHITQLMEETTTEKTSLEDIDLGSGLFEKPKATELIEFSTIKVTVPSDITTAFSSVDRLHTTSAFKPSSAITKKPPLIDREPGEETTSDMVIIGESTSHVPPTTLEDIVAKETETDIDREYFTTSSPPATQPTRPPTVEDKEAFGPQALSTPQPPASTKFHPDINVYIIEVRENKTGRMSDLSVIGHPIDSESKEDEPCSEETDPVHDLMAEILPEFPDIIEIDLYHSEENEEEEEECANATDVTTTPSVQYINGKHLVTTVPKDPEAAEARRGQFESVAPSQNFSDSSESDTHPFVIAKTELSTAVQPNESTETTESLEVTWKPETYPETSEHFSGGEPDVFPTVPFHEEFESGTAKKGAESVTERDTEVGHQAHEHTEPVSLFPEESSGEIAIDQESQKIAFARATEVTFGEEVEKSTSVTYTPTIVPSSASAYVSEEEAVTLIGNPWPDDLLSTKESWVEATPRQVVELSGSSSIPITEGSGEAEEDEDTMFTMVTDLSQRNTTDTLITLDTSRIITESFFEVPATTIYPVSEQPSAKVVPTKFVSETDTSEWISSTTVEEKKRKEEEGTTGTASTFEVYSSTQRSDQLILPFELESPNVATSSDSGTRKSFMSLTTPTQSEREMTDSTPVFTETNTLENLGAQTTEHSSIHQPGVQEGLTTLPRSPASVFMEQGSGEAAADPETTTVSSFSLNVEYAIQAEKEVAGTLSPHVETTFSTEPTGLVLSTVMDRVVAENITQTSREIVISERLGEPNYGAEIRGFSTGFPLEEDFSGDFREYSTVSHPIAKEETVMMEGSGDAAFRDTQTSPSTVPTSVHISHISDSEGPSSTMVSTSAFPWEEFTSSAEGSGEQLVTVSSSVVPVLPSAVQKFSGTASSIIDEGLGEVGTVNEIDRRSTILPTAEVEGTKAPVEKEEVKVSGTVSTNFPQTIEPAKLWSRQEVNPVRQEIESETTSEEQIQEEKSFESPQNSPATEQTIFDSQTFTETELKTTDYSVLTTKKTYSDDKEMKEEDTSLVNMSTPDPDANGLESYTTLPEATEKSHFFLATALVTESIPAEHVVTDSPIKKEESTKHFPKGMRPTIQESDTELLFSGLGSGEEVLPTLPTESVNFTEVEQINNTLYPHTSQVESTSSDKIEDFNRMENVAKEVGPLVSQTDIFEGSGSVTSTTLIEILSDTGAEGPTVAPLPFSTDIGHPQNQTVRWAEEIQTSRPQTITEQDSNKNSSTAEINETTTSSTDFLARAYGFEMAKEFVTSAPKPSDLYYEPSGEGSGEVDIVDSFHTSATTQATRQESSTTFVSDGSLEKHPEVPSAKAVTADGFPTVSVMLPLHSEQNKSSPDPTSTLSNTVSYERSTDGSFQDRFREFEDSTLKPNRKKPTENIIIDLDKEDKDLILTITESTILEILPELTSDKNTIIDIDHTKPVYEDILGMQTDIDTEVPSEPHDSNDESNDDSTQVQEIYEAAVNLSLTEETFEGSADVLASYTQATHDESMTYEDRSQLDHMGFHFTTGIPAPSTETELDVLLPTATSLPIPRKSATVIPEIEGIKAEAKALDDMFESSTLSDGQAIADQSEIIPTLGQFERTQEEYEDKKHAGPSFQPEFSSGAEEALVDHTPYLSIATTHLMDQSVTEVPDVMEGSNPPYYTDTTLAVSTFAKLSSQTPSSPLTIYSGSEASGHTEIPQPSALPGIDVGSSVMSPQDSFKEIHVNIEATFKPSSEEYLHITEPPSLSPDTKLEPSEDDGKPELLEEMEASPTELIAVEGTEILQDFQNKTDGQVSGEAIKMFPTIKTPEAGTVITTADEIELEGATQWPHSTSASATYGVEAGVVPWLSPQTSERPTLSSSPEINPETQAALIRGQDSTIAASEQQVAARILDSNDQATVNPVEFNTEVATPPFSLLETSNETDFLIGINEESVEGTAIYLPGPDRCKMNPCLNGGTCYPTETSYVCTCVPGYSGDQCELDFDECHSNPCRNGATCVDGFNTFRCLCLPSYVGALCEQDTETCDYGWHKFQGQCYKYFAHRRTWDAAERECRLQGAHLTSILSHEEQMFVNRVGHDYQWIGLNDKMFEHDFRWTDGSTLQYENWRPNQPDSFFSAGEDCVVIIWHENGQWNDVPCNYHLTYTCKKGTVACGQPPVVENAKTFGKMKPRYEINSLIRYHCKDGFIQRHLPTIRCLGNGRWAIPKITCMNPSAYQRTYSMKYFKNSSSAKDNSINTSKHDHRWSRRWQESRR

SEQ ID NO: 119 - protein, 317 aa, Homo sapiens
MTSRTRVTWPSPPRPLPVPAAAAVAFGAKGTDPAEARSSRGIEEAGPRAHGRAGREPERRRSRQQRRGGLQARRSTLLKTCARARATAPGAMKMVAPWTRFYSNSCCLCCHVRTGTILLGVWYLIINAVVLLILLSALADPDQYNFSSSELGGDFEFMDDANMCIAIAISLLMILICAMATYGAYKQRAAWIIPFFCYQIFDFALNMLVAITVLIYPNSIQEYIRQLPPNFPYRDDVMSVNPTCLVLIILLFISIILTFKGYLISCVWNCYRYINGRNSSDVLVYVTSNDTTVLLPPYDDATVNGAAKEPPPPYVSA

SEQ ID NO: 120 - protein, 474 aa, Homo sapiens
MVQQTNNAENTEALLAGESSDSGAGLELGIASSPTPGSTASTGGKADDPSWCKTPSGHIKRPMNAFMVWSQIERRKIMEQSPDMHNAEISKRLGKRWKLLKDSDKIPFIREAERLRLKHMADYPDYKYRPRKKVKSGNANSSSSAAASSKPGEKGDKVGGSGGGGHGGGGGGGSSNAGGGGGGASGGGANSKPAQKKSCGSKVAGGAGGGVSKPHAKLILAGGGGGGKAAAAAAASFAAEQAGAAALLPLGAAADHHSLYKARTPSASASASSAASASAALAAPGKHLAEKKVKRVYLFGGLGTSSSPVGGVGAGADPSDPLGLYEEEGAGCSPDAPSLSGRSSAASSPAAGRSPADHRGYASLRAASPAPSSAPSHASSSASSHSSSSSSSGSSSSDDEFEDDLLDLNPSSNFESMSLGSFSSSSALDRDLDFNFEPGSGSHFEFPDYCTPEVSEMISGDWLESSISNLVFTY

SEQ ID NO: 121 - protein, 357 aa, Homo sapiens
MAAAAKPNNLSLVVHGPGDLRLENYPIPEPGPNEVLLRMHSVGICGSDVHYWEYGRIGNFIVKKPMVLGHEASGTVEKVGSSVKHLKPGDRVAIEPGAPRENDEFCKMGRYNLSPSIFFCATPPDDGNLCRFYKHNAAFCYKLPDNVTFEEGALIEPLSVGIHACRRGGVTLGHKVLVCGAGPIGMVTLLVAKAMGAAQVVVTDLSATRLSKAKEIGADLVLQISKESPQEIARKVEGQLGCKPEVTIECTGAEASIQAGIYATRSGGTLVLVGLGSEMTTVPLLHAAIREVDIKGVFRYCNTWPVAISMLASKSVNVKPLVTHRFPLEKALEAFETFKKGLGLKIMLKCDPSDQNP

SEQ ID NO: 122 - protein, 470 aa, Homo sapiens
MKFLLILLLQATASGALPLNSSTSLEKNNVLFGERYLEKFYGLEINKLPVTKMKYSGNLMKEKIQEMQHFLGLKVTGQLDTSTLEMMHAPRCGVPDLHHFREMPGGPVWRKHYITYRINNYTPDMNREDVDYAIRKAFQVWSNVTPLKFSKINTGMADILVVFARGAHGDFHAFDGKGGILAHAFGPGSGIGGDAHFDEDEFWTTHSGGTNLFLTAVHEIGHSLGLGHSSDPKAVMFPTYKYVDINTFRLSADDIRGIQSLYGDPKENQRLPNPDNSEPALCDPNLSFDAVTTVGNKIFFFKDRFFWLKVSERPKTSVNLISSLWPTLPSGIEAAYEIEARNQVFLFKDDKYWLISNLRPEPNYPKSIHSFGFPNFVKKIDAAVFNPRFYRTYFFVDNQYWRYDERRQMMDPGYPKLITKNFQGIGPKIDAVFYSKNKYYYFFQGSNQFEYDFLLQRITKTLKSNSWFGC

SEQ ID NO: 123 - protein, 165 aa, Homo sapiens
MAPNASCLCVHVRSEEWDLMTFDANPYDSVKKIKEHVRSKTKVPVQDQVLLLGSKILKPRRSLSSYGIDKEKTIHLTLKVVKPSDEELPLFLVESGDEAKRHLLQVRRSSSVAQVKAMIETKTGIIPETQIVTCNGKRLEDGKMMADYGIRKGNLLFLASYCIGG

SEQ ID NO: 124 - protein, 2828 aa, Homo sapiens
MPKRAHWGALSVVLILLWGHPRVALACPHPCACYVPSEVHCTFRSLASVPAGIARHVERINLGFNSIQALSETSFAGLTKLELLMIHGNEIPSIPDGALRDLSSLQVFKFSYNKLRVITGQTLQGLSNLMRLHIDHNKIEFIHPQAFNGLTSLRLLHLEGNLLHQLHPSTFSTFTFLDYFRLSTIRHLYLAENMVRTLPASMLRNMPLLENLYLQGNPWTCDCEMRWFLEWDAKSRGILKCKKDKAYEGGQLCAMCFSPKKLYKHEIHKLKDMTCLKPSIESPLRQNRSRSIEEEQEQEEDGGSQLILEKFQLPQWSISLNMTDEHGNMVNLVCDIKKPMDVYKIHLNQTDPPDIDINATVALDFECPMTRENYEKLWKLIAYYSEVPVKLHRELMLSKDPRVSYQYRQDADEEALYYTGVRAQILAEPEWVMQPSIDIQLNRRQSTAKKVLLSYYTQYSQTISTKDTRQARGRSWVMIEPSGAVQRDQTVLEGGPCQLSCNVKASESPSIFWVLPDGSILKAPMDDPDSKFSILSSGWLRIKSMEPSDSGLYQCIAQVRDEMDRMVYRVLVQSPSTQPAEKDTVTIGKNPGESVTLPCNALAIPEAHLSWILPNRRIINDLANTSHVYMLPNGTLSIPKVQVSDSGYYRCVAVNQQGADHFTVGITVTKKGSGLPSKRGRRPGAKALSRVREDIVEDEGGSGMGDEENTSRRLLHPKDQEVFLKTKDDAINGDKKAKKGRRKLKLWKHSEKEPETNVAEGRRVFESRRRINMANKQINPERWADILAKVRGKNLPKGTEVPPLIKTTSPPSLSLEVTPPFPAVSPPSASPVQTVTSAEESSADVPLLGEEEHVLGTISSASMGLEHNHNGVILVEPEVTSTPLEEVVDDLSEKTEEITSTEGDLKGTAAPTLISEPYEPSPTLHTLDTVYEKPTHEETATEGWSAADVGSSPEPTSSEYEPPLDAVSLAESEPMQYFDPDLETKSQPDEDKMKEDTFAHLTPTPTIWVNDSSTSQLFEDSTIGEPGVPGQSHLQGLTDNIHLVKSSLSTQDTLLIKKGMKEMSQTLQGGNMLEGDPTHSRSSESEGQESKSITLPDSTLGIMSSMSPVKKPAETTVGTLLDKDTTTVTTTPRQKVAPSSTMSTHPSRRRPNGRRRLRPNKFRHRHKQTPPTTFAPSETFSTQPTQAPDIKISSQVESSLVPTAWVDNTVNTPKQLEMEKNAEPTSKGTPRRKHGKRPNKHRYTPSTVSSRASGSKPSPSPENKHRNIVTPSSETILLPRTVSLKTEGPYDSLDYMTTTRKIYSSYPKVQETLPVTYKPTSDGKEIKDDVATNVDKHKSDILVTGESITNAIPTSRSLVSTMGEFKEESSPVGFPGTPTWNPSRTAQPGRLQTDIPVTTSGENLTDPPLLKELEDVDFTSEFLSSLTVSTPFHQEEAGSSTTLSSIKVEVASSQAETTTLDQDHLETTVAILLSETRPQNHTPTAARMKEPASSSPSTILMSLGQTTTTKPALPSPRISQASRDSKENVFLNYVGNPETEATPVNNEGTQHMSGPNELSTPSSDRDAFNLSTKLELEKQVFGSRSLPRGPDSQRQDGRVHASHQLTRVPAKPILPTATVRLPEMSTQSASRYFVTSQSPRHWTNKPEITTYPSGALPENKQFTTPRLSSTTIPLPLHMSKPSIPSKFTDRRTDQFNGYSKVFGNNNIPEARNPVGKPPSPRIPHYSNGRLPFFTNKTLSFPQLGVTRRPQIPTSPAPVMRERKVIPGSYNRIHSHSTFHLDFGPPAPPLLHTPQTTGSPSTNLQNIPMVSSTQSSISFITSSVQSSGSFHQSSSKFFAGGPPASKFWSLGEKPQILTKSPQTVSVTAETDTVFPCEATGKPKPFVTWTKVSTGALMTPNTRIQRFEVLKNGTLVIRKVQVQDRGQYMCTASNLHGLDRMVVLLSVTVQQPQILASHYQDVTVYLGDTIAMECLAKGTPAPQISWIFPDRRVWQTVSPVESRITLHENRTLSIKEASFSDRGVYKCVASNAAGADSLAIRLHVAALPPVIHQEKLENISLPPGLSIHIHCTAKAAPLPSVRWVLGDGTQIRPSQFLHGNLFVFPNGTLYIRNLAPKDSGRYECVAANLVGSARRTVQLNVQRAAANARITGTSPRRTDVRYGGTLKLDCSASGDPWPRILWRLPSKRMIDALFSFDSRIKVFANGTLVVKSVTDKDAGDYLCVARNKVGDDYVVLKVDVVMKPAKIEHKEENDHKVFYGGDLKVDCVATGLPNPEISWSLPDGSLVNSFMQSDDSGGRTKRYVVFNNGTLYFNEVGMREEGDYTCFAENQVGKDEMRVRVKVVTAPATIRNKTYLAVQVPYGDVVTVACEAKGEPMPKVTWLSPTNKVIPTSSEKYQIYQDGTLLIQKAQRSDSGNYTCLVRNSAGEDRKTVWIHVNVQPPKINGNPNPITTVREIAAGGSRKLIDCKAEGIPTPRVLWAFPEGVVLPAPYYGNRITVHGNGSLDIRSLRKSDSVQLVCMARNEGGEARLIVQLTVLEPMEKPIFHDPISEKITAMAGHTISLNCSAAGTPTPSLVWVLPNGTDLQSGQQLQRFYHKADGMLHISGLSSVDAGAYRCVARNAAGHTERLVSLKVGLKPEANKQYHNLVSIINGETLKLPCTPPGAGQGRFSWTLPNGMHLEGPQTLGRVSLLDNGTLTVREASVFDRGTYVCRMETEYGPSVTSIPVIVIAYPPRITSEPTPVIYTRPGNTVKLNCMAMGIPKADITWELPDKSHLKAGVQARLYGNRFLHPQGSLTIQHATQRDAGFYKCMAKNILGSDSKTTYIHVF

SEQ ID NO: 125 - protein, 1464 aa, Homo sapiens
MFSFVDLRLLLLLAATALLTHGQEEGQVEGQDEDIPPITCVQNGLRYHDRDVWKPEPCRICVCDNGKVLCDDVICDETKNCPGAEVPEGECCPVCPDGSESPTDQETTGVEGPKGDTGPRGPRGPAGPPGRDGIPGQPGLPGPPGPPGPPGPPGLGGNFAPQLSYGYDEKSTGGISVPGPMGPSGPRGLPGPPGAPGPQGFQGPPGEPGEPGASGPMGPRGPPGPPGKNGDDGEAGKPGRPGERGPPGPQGARGLPGTAGLPGMKGHRGFSGLDGAKGDAGPAGPKGEPGSPGENGAPGQMGPRGLPGERGRPGAPGPAGARGNDGATGAAGPPGPTGPAGPPGFPGAVGAKGEAGPQGPRGSEGPQGVRGEPGPPGPAGAAGPAGNPGADGQPGAKGANGAPGIAGAPGFPGARGPSGPQGPGGPPGPKGNSGEPGAPGSKGDTGAKGEPGPVGVQGPPGPAGEEGKRGARGEPGPTGLPGPPGERGGPGSRGFPGADGVAGPKGPAGERGSPGPAGPKGSPGEAGRPGEAGLPGAKGLTGSPGSPGPDGKTGPPGPAGQDGRPGPPGPPGARGQAGVMGFPGPKGAAGEPGKAGERGVPGPPGAVGPAGKDGEAGAQGPPGPAGPAGERGEQGPAGSPGFQGLPGPAGPPGEAGKPGEQGVPGDLGAPGPSGARGERGFPGERGVQGPPGPAGPRGANGAPGNDGAKGDAGAPGAPGSQGAPGLQGMPGERGAAGLPGPKGDRGDAGPKGADGSPGKDGVRGLTGPIGPPGPAGAPGDKGESGPSGPAGPTGARGAPGDRGEPGPPGPAGFAGPPGADGQPGAKGEPGDAGAKGDAGPPGPAGPAGPPGPIGNVGAPGAKGARGSAGPPGATGFPGAAGRVGPPGPSGNAGPPGPPGPAGKEGGKGPRGETGPAGRPGEVGPPGPPGPAGEKGSPGADGPAGAPGTPGPQGIAGQRGVVGLPGQRGERGFPGLPGPSGEPGKQGPSGASGERGPPGPMGPPGLAGPPGESGREGAPAAEGSPGRDGSPGAKGDRGETGPAGPPGAPGAPGAPGPVGPAGKSGDRGETGPAGPAGPVGPVGARGPAGPQGPRGDKGETGEQGDRGIKGHRGFSGLQGPPGPPGSPGEQGPSGASGPAGPRGPPGSAGAPGKDGLNGLPGPIGPPGPRGRTGDAGPVGPPGPPGPPGPPGPPSAGFDFSFLPQPPQEKAHDGGRYYRADDANVVRDRDLEVDTTLKSLSQQIENIRSPEGSRKNPARTCRDLKMCHSDWKSGEYWIDPNQGCNLDAIKVFCNMETGETCVYPTQPSVAQKNWYISKNPKDKRHVWFGESMTDGFQFEYGGQGSDPADVAIQLTFLRLMSTEASQNITYHCKNSVAYMDQQTGNLKKALLLKGSNEIEIRAEGNSRFTYSVTVDGCTSHTGAWGKTVIEYKTTKSSRLPIIDVAPLDVGAPDQEFGFDVGPVCFL

SEQ ID NO: 126 - protein, 308 aa, Homo sapiens
MPGQELRTVNGSQMLLVLLVLSWLPHGGALSLAEASRASFPGPSELHSEDSRFRELRKRYEDLLTRLRANQSWEDSNTDLVPAPAVRILTPEVRLGSGGHLHLRISRAALPEGLPEASRLHRALFRLSPTASRSWDVTRPLRRQLSLARPQAPALHLRLSPPPSQSDQLLAESSSARPQLELHLRPQAARGRRRARARNGDDCPLGPGRCCRLHTVRASLEDLGWADWVLSPREVQVTMCIGACPSQFRAANMHAQIKTSLHRLKPDTEPAPCCVPASYNPMVLIQKTDTGVSLQTYDDLLAKDCHCI

SEQ ID NO: 127 - protein, 359 aa, Homo sapiens
MPAHLLQDDISSSYTTTTTITAPPSRVLQNGGDKLETMPLYLEDDIRPDIKDDIYDPTYKDKEGPSPKVEYVWRNIILMSLLHLGALYGITLIPTCKFYTWLWGVFYYFVSALGITAGAHRLWSHRSYKARLPLRLFLIIANTMAFQNDVYEWARDHRAHHKFSETHADPHNSRRGFFFSHVGWLLVRKHPAVKEKGSTLDLSDLEAEKLVMFQRRYYKPGLLLMCFILPTLVPWYFWGETFQNSVFVATFLRYAVVLNATWLVNSAAHLFGYRPYDKNISPRENILVSLGAVGEGFHNYHHSFPYDYSASEYRWHINFTTFFIDCMAALGLAYDRKKVSKAAILARIKRTGDGNYKSG

SEQ ID NO: 128 - protein, 96 aa, Homo sapiens
MCCTKSLLLAALMSVLLLHLCGESEAASNFDCCLGYTDRILHPKFIVGFTRQLANEGCDINAIIFHTKKKLSVCANPKQTWVKYIVRLLSKKVKNM

SEQ ID NO: 129 - protein, 518 aa, Homo sapiens
MGALARALLLPLLAQWLLRAAPELAPAPFTLPLRVAAATNRVVAPTPGPGTPAERHADGLALALEPALASPAGAANFLAMVDNLQGDSGRGYYLEMLIGTPPQKLQILVDTGSSNFAVAGTPHSYIDTYFDTERSSTYRSKGFDVTVKYTQGSWTGFVGEDLVTIPKGFNTSFLVNIATIFESENFFLPGIKWNGILGLAYATLAKPSSSLETFFDSLVTQANIPNVFSMQMCGAGLPVAGSGTNGGSLVLGGIEPSLYKGDIWYTPIKEEWYYQIEILKLEIGGQSLNLDCREYNADKAIVDSGTTLLRLPQKVFDAVVEAVARASLIPEFSDGFWTGSQLACWTNSETPWSYFPKISIYLRDENSSRSFRITILPQLYIQPMMGAGLNYECYRFGISPSTNALVIGATVMEGFYVIFDRAQKRVGFAASPCAEIAGAAVSEISGPFSTEDVASNCVPAQSLSEPILWIVSYALMSVCGAILLVLIVLLLLPFRCQRRPRDPEVVNDESSLVRHRWK

SEQ ID NO: 130 - protein, 423 aa, Homo sapiens
MRSSGADAGRCLVTARAPGSVPASREGSAGSRGPGARFPARVSARGSAPGPGLGGAGALDPPAVVAESVSSLTIADAFIAAGESSAPTPPRPALPRRFICSFPDCSANYSKAWKLDAHLCKHTGERPFVCDYEGCGKAFIRDYHLSRHILTHTGEKPFVCAANGCDQKFNTKSNLKKHFERKHENQQKQYICSFEDCKKTFKKHQQLKIHQCQNTNEPLFKCTQEGCGKHFASPSKLKRHAKAHEGYVCQKGCSFVAKTWTELLKHVRETHKEEILCEVCRKTFKRKDYLKQHMKTHAPERDVCRCPREGCGRTYTTVFNLQSHILSFHEESRPFVCEHAGCGKTFAMKQSLTRHAVVHDPDKKKMKLKVKKSREKREFGLSSQWIYPPKRKQGQGLSLCQNGESPNCVEDKMLSTVAVLTLG

SEQ ID NO: 131 - protein, 677 aa, Homo sapiens
MLSSTDFTFASWELVVRVDHPNEEQQKDVTLRVSGDLHVGGVMLKLVEQINISQDWSDFALWWEQKHCWLLKTHWTLDKYGVQADAKLLFTPQHKMLRLRLPNLKMVRLRVSFSAVVFKAVSDICKILNIRRSEELSLLKPSGDYFKKKKKKDKNNKEPIIEDILNLESSPTASGSSVSPGLYSKTMTPIYDPINGTPASSTMTWFSDSPLTEQNCSILAFSQPPQSPEALADMYQPRSLVDKAKLNAGWLDSSRSLMEQGIQEDEQLLLRFKYYSFFDLNPKYDAVRINQLYEQARWAILLEEIDCTEEEMLIFAALQYHISKLSLSAETQDFAGESEVDEIEAALSNLEVTLEGGKADSLLEDITDIPKLADNLKLFRPKKLLPKAFKQYWFIFKDTSIAYFKNKELEQGEPLEKLNLRGCEVVPDVNVAGRKFGIKLLIPVADGMNEMYLRCDHENQYAQWMAACMLASKGKTMADSSYQPEVLNILSFLRMKNRNSASQVASSLENMDMNPECFVSPRCAKKHKSKQLAARILEAHQNVAQMPLVEAKLRFIQAWQSLPEFGLTYYLVRFKGSKKDDILGVSYNRLIKIDAATGIPVTTWRFTNIKQWNVNWETRQVVIEFDQNVFTAFTCLSADCKIVHEYIGGYIFLSTRSKDQNETLDEDLFHKLTGGQD

SEQ ID NO: 132 - protein, 836 aa, Homo sapiens
MIPFLPMFSLLLLLIVNPINANNHYDKILAHSRIRGRDQGPNVCALQQILGTKKKYFSTCKNWYKKSICGQKTTVLYECCPGYMRMEGMKGCPAVLPIDHVYGTLGIVGATTTQRYSDASKLREEIEGKGSFTYFAPSNEAWDNLDSDIRRGLESNVNVELLNALHSHMINKRMLTKDLKNGMIIPSMYNNLGLFINHYPNGVVTVNCARIIHGNQIATNGVVHVIDRVLTQIGTSIQDFIEAEDDLSSFRAAAITSDILEALGRDGHFTLFAPTNEAFEKLPRGVLERFMGDKVASEALMKYHILNTLQCSESIMGGAVFETLEGNTIEIGCDGDSITVNGIKMVNKKDIVTNNGVIHLIDQVLIPDSAKQVIELAGKQQTTFTDLVAQLGLASALRPDGEYTLLAPVNNAFSDDTLSMVQRLLKLILQNHILKVKVGLNELYNGQILETIGGKQLRVFVYRTAVCIENSCMEKGSKQGRNGAIHIFREIIKPAEKSLHEKLKQDKRFSTFLSLLEAADLKELLTQPGDWTLFVPTNDAFKGMTSEEKEILIRDKNALQNIILYHLTPGVFIGKGFEPGVTNILKTTQGSKIFLKEVNDTLLVNELKSKESDIMTTNGVIHVVDKLLYPADTPVGNDQLLEILNKLIKYIQIKFVRGSTFKEIPVTVYTTKIITKVVEPKIKVIEGSLQPIIKTEGPTLTKVKIEGEPEFRLIKEGETITEVIHGEPIIKKYTKIIDGVPVEITEKETREERIITGPEIKYTRISTGGGETEETLKKLLQEEVTKVTKFIEGGDGHLFEDEEIKRLLQGDTPVRKLQANKKVQGSRRRLREGRSQ

SEQ ID NO: 133 - protein, 303 aa, Homo sapiens
MRAWIFFLLCLAGRALAAPQQEALPDETEVVEETVAEVTEVSVGANPVQVEVGEFDDGAEETEEEVVAENPCQNHHCKHGKVCELDENNTPMCVCQDPTSCPAPIGEFEKVCSNDNKTFDSSCHFFATKCTLEGTKKGHKLHLDYIGPCKYIPPCLDSELTEFPLRMRDWLKNVLVTLYERDEDNNLLTEKQKLRVKKIHENEKRLEAGDHPVELLARDFEKNYNMYIFPVHWQFGQLDQHPIDGYLSHTELAPLRAPLIPMEHCTTRFFETCDLDNDKYIALDEWAGCFGIKQKDIDKDLVI

SEQ ID NO: 134 - protein, 683 aa, Homo sapiens
MALFVRLLALALALALGPAATLAGPAKSPYQLVLQHSRLRGRQHGPNVCAVQKVIGTNRKYFTNCKQWYQRKICGKSTVISYECCPGYEKVPGEKGCPAALPLSNLYETLGVVGSTTTQLYTDRTEKLRPEMEGPGSFTIFAPSNEAWASLPAEVLDSLVSNVNIELLNALRYHMVGRRVLTDELKHGMTLTSMYQNSNIQIHHYPNGIVTVNCARLLKADHHATNGVVHLIDKVISTITNNIQQIIEIEDTFETLRAAVAASGLNTMLEGNGQYTLLAPTNEAFEKIPSETLNRILGDPEALRDLLNNHILKSAMCAEAIVAGLSVETLEGTTLEVGCSGDMLTINGKAIISNKDILATNGVIHYIDELLIPDSAKTLFELAAESDVSTAIDLFRQAGLGNHLSGSERLTLLAPLNSVFKDGTPPIDAHTRNLLRNHIIKDQLASKYLYHGQTLETLGGKKLRVFVYRNSLCIENSCIAAHDKRGRYGTLFTMDRVLTPPMGTVMDVLKGDNRFSMLVAAIQSAGLTETLNREGVYTVFAPTNEAFRALPPRERSRLLGDAKELANILKYHIGDEILVSGGIGALVRLKSLQGDKLEVSLKNNVVSVNKEPVAEPDIMATNGVVHVITNVLQPPANRPQERGDELADSALEIFKQASAFSRASQRSVRLAPVYQKLLERMKH

SEQ ID NO: 135 - protein, 2355 aa, Homo sapiens
MLRGPGPGLLLLAVQCLGTAVPSTGASKSKRQAQQMVQPQSPVAVSQSKPGCYDNGKHYQINQQWERTYLGNALVCTCYGGSRGFNCESKPEAEETCFDKYTGNTYRVGDTYERPKDSMIWDCTCIGAGRGRISCTIANRCHEGGQSYKIGDTWRRPHETGGYMLECVCLGNGKGEWTCKPIAEKCFDHAAGTSYVVGETWEKPYQGWMMVDCTCLGEGSGRITCTSRNRCNDQDTRTSYRIGDTWSKKDNRGNLLQCICTGNGRGEWKCERHTSVQTTSSGSGPFTDVRAAVYQPQPHPQPPPYGHCVTDSGVVYSVGMQWLKTQGNKQMLCTCLGNGVSCQETAVTQTYGGNSNGEPCVLPFTYNGRTFYSCTTEGRQDGHLWCSTTSNYEQDQKYSFCTDHTVLVQTRGGNSNGALCHFPFLYNNHNYTDCTSEGRRDNMKWCGTTQNYDADQKFGFCPMAAHEEICTTNEGVMYRIGDQWDKQHDMGHMMRCTCVGNGRGEWTCIAYSQLRDQCIVDDITYNVNDTFHKRHEEGHMLNCTCFGQGRGRWKCDPVDQCQDSETGTFYQIGDSWEKYVHGVRYQCYCYGRGIGEWHCQPLQTYPSSSGPVEVFITETPSQPNSHPIQWNAPQPSHISKYILRWRPKNSVGRWKEATIPGHLNSYTIKGLKPGVVYEGQLISIQQYGHQEVTRFDFTTTSTSTPVTSNTVTGETTPFSPLVATSESVTEITASSFVVSWVSASDTVSGFRVEYELSEEGDEPQYLDLPSTATSVNIPDLLPGRKYIVNVYQISEDGEQSLILSTSQTTAPDAPPDPTVDQVDDTSIVVRWSRPQAPITGYRIVYSPSVEGSSTELNLPETANSVTLSDLQPGVQYNITIYAVEENQESTPVVIQQETTGTPRSDTVPSPRDLQFVEVTDVKVTIMWTPPESAVTGYRVDVIPVNLPGEHGQRLPISRNTFAEVTGLSPGVTYYFKVFAVSHGRESKPLTAQQTTKLDAPTNLQFVNETDSTVLVRWTPPRAQITGYRLTVGLTRRGQPRQYNVGPSVSKYPLRNLQPASEYTVSLVAIKGNQESPKATGVFTTLQPGSSIPPYNTEVTETTIVITWTPAPRIGFKLGVRPSQGGEAPREVTSDSGSIVVSGLTPGVEYVYTIQVLRDGQERDAPIVNKVVTPLSPPTNLHLEANPDTGVLTVSWERSTTPDITGYRITTTPTNGQQGNSLEEVVHADQSSCTFDNLSPGLEYNVSVYTVKDDKESVPISDTIIPAVPPPTDLRFTNIGPDTMRVTWAPPPSIDLTNFLVRYSPVKNEEDVAELSISPSDNAVVLTNLLPGTEYVVSVSSVYEQHESTPLRGRQKTGLDSPTGIDFSDITANSFTVHWIAPRATITGYRIRHHPEHFSGRPREDRVPHSRNSITLTNLTPGTEYVVSIVALNGREESPLLIGQQSTVSDVPRDLEVVAATPTSLLISWDAPAVTVRYYRITYGETGGNSPVQEFTVPGSKSTATISGLKPGVDYTITVYAVTGRGDSPASSKPISINYRTEIDKPSQMQVTDVQDNSISVKWLPSSSPVTGYRVTTTPKNGPGPTKTKTAGPDQTEMTIEGLQPTVEYVVSVYAQNPSGESQPLVQTAVTNIDRPKGLAFTDVDVDSIKIAWESPQGQVSRYRVTYSSPEDGIHELFPAPDGEEDTAELQGLRPGSEYTVSVVALHDDMESQPLIGTQSTAIPAPTDLKFTQVTPTSLSAQWTPPNVQLTGYRVRVTPKEKTGPMKEINLAPDSSSVVVSGLMVATKYEVSVYALKDTLTSRPAQGVVTTLENVSPPRRARVTDATETTITISWRTKTETITGFQVDAVPANGQTPIQRTIKPDVRSYTITGLQPGTDYKIYLYTLNDNARSSPVVIDASTAIDAPSNLRFLATTPNSLLVSWQPPRARITGYIIKYEKPGSPPREVVPRPRPGVTEATITGLEPGTEYTIYVIALKNNQKSEPLIGRKKTDELPQLVTLPHPNLHGPEILDVPSTVQKTPFVTHPGYDTGNGIQLPGTSGQQPSVGQQMIFEEHGFRRTTPPTTATPIRHRPRPYPPNVGQEALSQTTISWAPFQDTSEYIISCHPVGTDEEPLQFRVPGTSTSATLTGLTRGATYNIIVEALKDQQRHKVREEVVTVGNSVNEGLNQPTDDSCFDPYTVSHYAVGDEWERMSESGFKLLCQCLGFGSGHFRCDSSRWCHDNGVNYKIGEKWDRQGENGQMMSCTCLGNGKGEFKCDPHEATCYDDGKTYHVGEQWQKEYLGAICSCTCFGGQRGWRCDNCRRPGGEPSPEGTTGQSYNQYSQRYHQRTNTNVNCPIECFMPLDVQADREDSRE

SEQ ID NO: 136 - protein, 1366 aa, Homo sapiens
MLSFVDTRTLLLLAVTLCLATCQSLQEETVRKGPAGDRGPRGERGPPGPPGRDGEDGPTGPPGPPGPPGPPGLGGNFAAQYDGKGVGLGPGPMGLMGPRGPPGAAGAPGPQGFQGPAGEPGEPGQTGPAGARGPAGPPGKAGEDGHPGKPGRPGERGVVGPQGARGFPGTPGLPGFKGIRGHNGLDGLKGQPGAPGVKGEPGAPGENGTPGQTGARGLPGERGRVGAPGPAGARGSDGSVGPVGPAGPIGSAGPPGFPGAPGPKGEIGAVGNAGPAGPAGPRGEVGLPGLSGPVGPPGNPGANGLTGAKGAAGLPGVAGAPGLPGPRGIPGPVGAAGATGARGLVGEPGPAGSKGESGNKGEPGSAGPQGPPGPSGEEGKRGPNGEAGSAGPPGPPGLRGSPGSRGLPGADGRAGVMGPPGSRGASGPAGVRGPNGDAGRPGEPGLMGPRGLPGSPGNIGPAGKEGPVGLPGIDGRPGPIGPAGARGEPGNIGFPGPKGPTGDPGKNGDKGHAGLAGARGAPGPDGNNGAQGPPGPQGVQGGKGEQGPAGPPGFQGLPGPSGPAGEVGKPGERGLHGEFGLPGPAGPRGERGPPGESGAAGPTGPIGSRGPSGPPGPDGNKGEPGVVGAVGTAGPSGPSGLPGERGAAGIPGGKGEKGEPGLRGEIGNPGRDGARGAHGAVGAPGPAGATGDRGEAGAAGPAGPAGPRGSPGERGEVGPAGPNGFAGPAGAAGQPGAKGERGAKGPKGENGVVGPTGPVGAAGPAGPNGPPGPAGSRGDGGPPGMTGFPGAAGRTGPPGPSGISGPPGPPGPAGKEGLRGPRGDQGPVGRTGEVGAVGPPGFAGEKGPSGEAGTAGPPGTPGPQGLLGAPGILGLPGSRGERGLPGVAGAVGEPGPLGIAGPPGARGPPGAVGSPGVNGAPGEAGRDGNPGNDGPPGRDGQPGHKGERGYPGNIGPVGAAGAPGPHGPVGPAGKHGNRGETGPSGPVGPAGAVGPRGPSGPQGIRGDKGEPGEKGPRGLPGLKGHNGLQGLPGIAGHHGDQGAPGSVGPAGPRGPAGPSGPAGKDGRTGHPGTVGPAGIRGPQGHQGPAGPPGPPGPPGPPGVSGGGYDFGYDGDFYRADQPRSAPSLRPKDYEVDATLKSLNNQIETLLTPEGSRKNPARTCRDLRLSHPEWSSGYYWIDPNQGCTMDAIKVYCDFSTGETCIRAQPENIPAKNWYRSSKDKKHVWLGETINAGSQFEYNVEGVTSKEMATQLAFMRLLANYASQNITYHCKNSIAYMDEETGNLKKAVILQGSNDVELVAEGNSRFTYTVLVDGCSKKTNEWGKTIIEYKTNKPSRLPFLDIAPLDIGGADHEFFVDIGPVCFK

SEQ ID NO: 137 - protein, 105 aa, Homo sapiens
MAKISSPTETERCIESLIAVFQKYAGKDGYNYTLSKTEFLSFMNTELAAFTKNQKDPGVLDRMMKKLDTNSDGQLDFSEFLNLIGGLAMACHDSFLKAVPSQKRT

SEQ ID NO: 138 - protein, 125 aa, Homo sapiens
MHKEEHEVAVLGAPPSTILPRSTVINIHSETSVPDHVVWSLFNTLFLNWCCLGFIAFAYSVKSRDRKMVGDVTGAQAYASTAKCLNIWALILGILMTIGFILLLVFGSVTVYHIMLQIIQEKRGY

SEQ ID NO: 139 - protein, 163 aa, Homo sapiens
MSESGFKLLCQCLGFGSGHFRCDSSRWCHDNGVNYKIGEKWDRQGENGQMMSCTCLGNGKGEFKCDPHEATCYDDGKTYHVGEQWQKEYLGAICSCTCFGGQRGWRCDNCRRPGGEPSPEGTTGQSYNQYSQRYHQRTNTNVNCPIECFMPLDVQADREDSRE

SEQ ID NO: 140 - protein, 1466 aa, Homo sapiens
MMSFVQKGSWLLLALLHPTIILAQQEAVEGGCSHLGQSYADRDVWKPEPCQICVCDSGSVLCDDIICDDQELDCPNPEIPFGECCAVCPQPPTAPTRPPNGQGPQGPKGDPGPPGIPGRNGDPGIPGQPGSPGSPGPPGICESCPTGPQNYSPQYDSYDVKSGVAVGGLAGYPGPAGPPGPPGPPGTSGHPGSPGSPGYQGPPGEPGQAGPSGPPGPPGAIGPSGPAGKDGESGRPGRPGERGLPGPPGIKGPAGIPGFPGMKGHRGFDGRNGEKGETGAPGLKGENGLPGENGAPGPMGPRGAPGERGRPGLPGAAGARGNDGARGSDGQPGPPGPPGTAGFPGSPGAKGEVGPAGSPGSNGAPGQRGEPGPQGHAGAQGPPGPPGINGSPGGKGEMGPAGIPGAPGLMGARGPPGPAGANGAPGLRGGAGEPGKNGAKGEPGPRGERGEAGIPGVPGAKGEDGKDGSPGEPGANGLPGAAGERGAPGFRGPAGPNGIPGEKGPAGERGAPGPAGPRGAAGEPGRDGVPGGPGMRGMPGSPGGPGSDGKPGPPGSQGESGRPGPPGPSGPRGQPGVMGFPGPKGNDGAPGKNGERGGPGGPGPQGPPGKNGETGPQGPPGPTGPGGDKGDTGPPGPQGLQGLPGTGGPPGENGKPGEPGPKGDAGAPGAPGGKGDAGAPGERGPPGLAGAPGLRGGAGPPGPEGGKGAAGPPGPPGAAGTPGLQGMPGERGGLGSPGPKGDKGEPGGPGADGVPGKDGPRGPTGPIGPPGPAGQPGDKGEGGAPGLPGIAGPRGSPGERGETGPPGPAGFPGAPGQNGEPGGKGERGAPGEKGEGGPPGVAGPPGGSGPAGPPGPQGVKGERGSPGGPGAAGFPGARGLPGPPGSNGNPGPPGPSGSPGKDGPPGPAGNTGAPGSPGVSGPKGDAGQPGEKGSPGAQGPPGAPGPLGIAGITGARGLAGPPGMPGPRGSPGPQGVKGESGKPGANGLSGERGPPGPQGLPGLAGTAGEPGRDGNPGSDGLPGRDGSPGGKGDRGENGSPGAPGAPGHPGPPGPVGPAGKSGDRGESGPAGPAGAPGPAGSRGAPGPQGPRGDKGETGERGAAGIKGHRGFPGNPGAPGSPGPAGQQGAIGSPGPAGPRGPVGPSGPPGKDGTSGHPGPIGPPGPRGNRGERGSEGSPGHPGQPGPPGPPGAPGPCCGGVGAAAIAGIGGEKAGGFAPYYGDEPMDFKINTDEIMTSLKSVNGQIESLISPDGSRKNPARNCRDLKFCHPELKSGEYWVDPNQGCKLDAIKVFCNMETGETCISANPLNVPRKHWWTDSSAEKKHVWFGESMDGGFQFSYGNPELPEDVLDVQLAFLRLLSSRASQNITYHCKNSIAYMDQASGNVKKALKLMGSNEGEFKAEGNSKFTYTVLEDGCTKHTGEWSKTVFEYRTRKAVRLPIVDIAPYDIGGPDQEFGVDVGPVCFL

SEQ ID NO: 141 - protein, 180 aa, Homo sapiens
MKSIYFVAGLFVMLVQGSWQRSLQDTEEKSRSFSASQADPLSDPDQMNEDKRHSQGTFTSDYSKYLDSRRAQDFVQWLMNTKRNRNNIAKRHDEFERHAEGTFTSDVSSYLEGQAAKEFIAWLVKGRGRRDFPEEVAIVEELGRRHADGSFSDEMNTILDNLAARDFINWLIQTKITDRK

SEQ ID NO: 142 - protein, 1064 aa, Homo sapiens
MKIATVSVLLPLALCLIQDAASKNEDQEMCHEFQAFMKNGKLFCPQDKKFFQSLDGIMFINKCATCKMILEKEAKSQKRARHLARAPKATAPTELNCDDFKKGERDGDFICPDYYEAVCGTDGKTYDNRCALCAENAKTGSQIGVKSEGECKSSNPEQDVCSAFRPFVRDGRLGCTRENDPVLGPDGKTHGNKCAMCAELFLKEAENAKREGETRIRRNAEKDFCKEYEKQVRNGRLFCTRESDPVRGPDGRMHGNKCALCAEIFKRRFSEENSKTDQNLGKAEEKTKVKREIVKLCSQYQNQAKNGILFCTRENDPIRGPDGKMHGNLCSMCQVYFQAENEEKKKAEARARNKRESGKATSYAELCNEYRKLVRNGKLACTRENDPIQGPDGKVHGNTCSMCEVFFQAEEEEKKKKEGESRNKRQSKSTASFEELCSEYRKSRKNGRLFCTRENDPIQGPDGKMHGNTCSMCEAFFQQEERARAKAKREAAKEICSEFRDQVRNGTLICTREHNPVRGPDGKMHGNKCAMCASVFKLEEEEKKNDKEEKGKVEAEKVKREAVQELCSEYRHYVRNGRLPCTRENDPIEGLDGKIHGNTCSMCEAFFQQEAKEKERAEPRAKVKREAEKETCDEFRRLLQNGKLFCTRENDPVRGPDGKTHGNKCAMCKAVFQKENEERKRKEEEDQRNAAGHGSSGGGGGNTQDECAEYQEQMKNGRLSCTRESDPVRDADGKSYNNQCTMCKAKLEREAERKNEYSRSRSNGTGSESGKDTCDEFRSQMKNGKLICTRESDPVRGPDGKTHGNKCTMCKEKLEREAAEKKKKEDEDRSNTGERSNTGERSNDKEDLCREFRSMQRNGKLICTRENNPVRGPYGKMHINKCAMCQSIFDREANERKKKDEEKSSSKPSNNAKDECSEFRNYIRNNELICPRENDPVHGADGKFYTNKCYMCRAVFLTEALERAKLQEKPSHVRASQEEDSPDSFSSLDSEMCKDYRVLPRIGYLCPKDLKPVCGDDGQTYNNPCMLCHENLIRQTNTHIRSTGKCEESSTPGTTAASMPPSDE

SEQ ID NO: 143 - protein, 967 aa, Homo sapiens
MAKGFYISKSLGILGILLGVAAVCTIIALSVVYSQEKNKNANSSPVASTTPSASATTNPASATTLDQSKAWNRYRLPNTLKPDSYQVTLRPYLTPNDRGLYVFKGSSTVRFTCKEATDVIIIHSKKLNYTLSQGHRVVLRGVGGSQPPDIDKTELVEPTEYLVVHLKGSLVKDSQYEMDSEFEGELADDLAGFYRSEYMEGNVRKVVATTQMQAADARKSFPCFDEPAMKAEFNITLIHPKDLTALSNMLPKGPSTPLPEDPNWNVTEFHTTPKMSTYLLAFIVSEFDYVEKQASNGVLIRIWARPSAIAAGHGDYALNVTGPILNFFAGHYDTPYPLPKSDQIGLPDFNAGAMENWGLVTYRENSLLFDPLSSSSSNKERVVTVIAHELAHQWFGNLVTIEWWNDLWLNEGFASYVEYLGADYAEPTWNLKDLMVLNDVYRVMAVDALASSHPLSTPASEINTPAQISELFDAISYSKGASVLRMLSSFLSEDVFKQGLASYLHTFAYQNTIYLNLWDHLQEAVNNRSIQLPTTVRDIMNRWTLQMGFPVITVDTSTGTLSQEHFLLDPDSNVTRPSEFNYVWIVPITSIRDGRQQQDYWLIDVRAQNDLFSTSGNEWVLLNLNVTGYYRVNYDEENWRKIQTQLQRDHSAIPVINRAQIINDAFNLASAHKVPVTLALNNTLFLIEERQYMPWEAALSSLSYFKLMFDRSEVYGPMKNYLKKQVTPLFIHFRNNTNNWREIPENLMDQYSEVNAISTACSNGVPECEEMVSGLFKQWMENPNNNPIHPNLRSTVYCNAIAQGGEEEWDFAWEQFRNATLVNEADKLRAALACSKELWILNRYLSYTLNPDLIRKQDATSTIISITNNVIGQGLVWDFVQSNWKKLFNDYGGGSFSFSNLIQAVTRRFSTEYELQQLEQFKKDNEETGFGSGTRALEQALEKTKANIKWVKENKEVVLQWFTENSK

SEQ ID NO: 144 - protein, 261 aa, Homo sapiens
MSGEIAMCEPEFGNDKAREPSVGGRWRVSWYERFVQPCLVELLGSALFIFIGCLSVIENGTDTGLLQPALAHGLALGLVIATLGNISGGHFNPAVSLAAMLIGGLNLVMLLPYWVSQLLGGMLGAALAKVVSPEERFWNASGAAFVTVQEQGQVAGALVAEIILTTLLALAVCMGAINEKTKGPLAPFSIGFAVTVDILAGGPVSGGCMNPARAFGPAVVANHWNFHWIYWLGPLLAGLLVGLLIRCFIGDGKTRLILKAR

SEQ ID NO: 145 - protein, 112 aa, Homo sapiens
MGCRAASGLLPGVAVVLLLLLQSTQSVYIQYQGFRVQLESMKKLSDLEAQWAPSPRLQAQSLLPAVCHHPALPQDLQPVCASQEASSIFKTLRTIANDDCELCVNVACTGCL

SEQ ID NO: 146 - protein, 917 aa, Homo sapiens
MGLFRGFVFLLVLCLLHQSNTSFIKLNNNGFEDIVIVIDPSVPEDEKIIEQIEDMVTTASTYLFEATEKRFFFKNVSILIPENWKENPQYKRPKHENHKHADVIVAPPTLPGRDEPYTKQFTECGEKGEYIHFTPDLLLGKKQNEYGPPGKLFVHEWAHLRWGVFDEYNEDQPFYRAKSKKIEATRCSAGISGRNRVYKCQGGSCLSRACRIDSTTKLYGKDCQFFPDKVQTEKASIMFMQSIDSVVEFCNEKTHNQEAPSLQNIKCNFRSTWEVISNSEDFKNTIPMVTPPPPPVFSLLKIRQRIVCLVLDKSGSMGGKDRLNRMNQAAKHFLLQTVENGSWVGMVHFDSTATIVNKLIQIKSSDERNTLMAGLPTYPLGGTSICSGIKYAFQVIGELHSQLDGSEVLLLTDGEDNTASSCIDEVKQSGAIVHFIALGRAADEAVIEMSKITGGSHFYVSDEAQNNGLIDAFGALTSGNTDLSQKSLQLESKGLTLNSNAWMNDTVIIDSTVGKDTFFLITWNSLPPSISLWDPSGTIMENFTVDATSKMAYLSIPGTAKVGTWAYNLQAKANPETLTITVTSRAANSSVPPITVNAKMNKDVNSFPSPMIVYAEILQGYVPVLGANVTAFIESQNGHTEVLELLDNGAGADSFKNDGVYSRYFTAYTENGRYSLKVRAHGGANTARLKLRPPLNRAAYIPGWVVNGEIEANPPRPEIDEDTQTTLEDFSRTASGGAFVVSQVPSLPLPDQYPPSQITDLDATVHEDKIILTWTAPGDNFDVGKVQRYIIRISASILDLRDSFDDALQVNTTDLSPKEANSKESFAFKPENISEENATHIFIAIKSIDKSNLTSKVSNIAQVTLFIPQANPDDIDPTPTPTPTPDKSHNSGVNISTLVLSVIGSVVIVNFILSTTI

SEQ ID NO: 147 - protein, 437 aa, Homo sapiens
MSAVLLLALLGFILPLPGVQALLCQFGTVQHVWKVSDLPRQWTPKNTSCDSGLGCQDTLMLIESGPQVSLVLSKGCTEAKDQEPRVTEHRMGPGLSLISYTFVCRQEDFCNNLVNSLPLWAPQPPADPGSLRCPVCLSMEGCLEGTTEEICPKGTTHCYDGLLRLRGGGIFSNLRVQGCMPQPGCNLLNGTQEIGPVGMTENCNRKDFLTCHRGTTIMTHGNLAQEPTDWTTSNTEMCEVGQVCQETLLLIDVGLTSTLVGTKGCSTVGAQNSQKTTIHSAPPGVLVASYTHFCSSDLCNSASSSSVLLNSLPPQAAPVPGDRQCPTCVQPLGTCSSGSPRMTCPRGATHCYDGYIHLSGGGLSTKMSIQGCVAQPSSFLLNHTRQIGIFSAREKRDVQPPASQHEGGGAEGLESLTWGVGLALAPALWWGVVCPSC

SEQ ID NO: 148 - protein, 452 aa, Homo sapiens
MLCGRPRSSSDNRNFLRERAGLSSAAVQTRIGNSAASRRSPAARPPVPAPPALPRGRPGTEGSTSLSAPAVLVVAVAVVVVVVSAVAWAMANYIHVPPGSPEVPKLNVTVQDQEEHRCREGALSLLQHLRPHWDPQEVTLQLFTDGITNKLIGCYVGNTMEDVVLVRIYGNKTELLVDRDEEVKSFRVLQAHGCAPQLYCTFNNGLCYEFIQGEALDPKHVCNPAIFRLIARQLAKIHAIHAHNGWIPKSNLWLKMGKYFSLIPTGFADEDINKRFLSDIPSSQILQEEMTWMKEILSNLGSPVVLCHNDLLCKNIIYNEKQGDVQFIDYEYSGYNYLAYDIGNHFNEFAGVSDVDYSLYPDRELQSQWLRAYLEAYKEFKGFGTEVTEKEVEILFIQVNQFALASHFFWGLWALIQAKYSTIEFDFLGYAIVRFNQYFKMKPEVTALKVPE

SEQ ID NO: 149 - protein, 192 aa, Homo sapiens
MGSLGSKNPQTKQAQVLLLGLDSAGKSTLLYKLKLAKDITTIPTIGFNVEMIELERNLSLTVWDVGGQEKMRTVWGCYCENTDGLVYVVDSTDKQRLEESQRQFEHILKNEHIKNVPVVLLANKQDMPGALTAEDITRMFKVKKLCSDRNWYVQPCCALTGEGLAQGFRKLTGFVKSHMKSRGDTLAFFKQN

SEQ ID NO: 150 - protein, 530 aa, Homo sapiens
MSLKWTSVFLLIQLSCYFSSGSCGKVLVWPTEYSHWINMKTILEELVQRGHEVTVLTSSASTLVNASKSSAIKLEVYPTSLTKNDLEDSLLKILDRWIYGVSKNTFWSYFSQLQELCWEYYDYSNKLCKDAVLNKKLMMKLQESKFDVILADALNPCGELLAELFNIPFLYSLRFSVGYTFEKNGGGFLFPPSYVPVVMSELSDQMIFMERIKNMIHMLYFDFWFQIYDLKKWDQFYSEVLGRPTTLFETMGKAEMWLIRTYWDFEFPRPFLPNVDFVGGLHCKPAKPLPKEMEEFVQSSGENGIVVFSLGSMISNMSEESANMIASALAQIPQKVLWRFDGKKPNTLGSNTRLYKWLPQNDLLGHPKTKAFITHGGTNGIYEAIYHGIPMVGIPLFADQHDNIAHMKAKGAALSVDIRTMSSRDLLNALKSVINDPVYKENVMKLSRIHHDQPMKPLDRAVFWIEFVMRHKGAKHLRVAAHNLTWIQYHSLDVIAFLLACVATVIFIITKFCLFCFRKLAKTGKKKKRD

SEQ ID NO: 151 - protein, 265 aa, Homo sapiens
MGSPSACPYRVCIPWQGLLLTASLLTFWNLPNSAQTNIDVVPFNVAEGKEVLLVVHNESQNLYGYNWYKGERVHANYRIIGYVKNISQENAPGPAHNGRETIYPNGTLLIQNVTHNDAGFYTLHVIKENLVNEEVTRQFYVFSEPPKPSITSNNFNPVENKDIVVLTCQPETQNTTYLWWVNNQSLLVSPRLLLSTDNRTLVLLSATKNDIGPYECEIQNPVGASRSDPVTLNVRYESVQASSPDLSAGTAVSIMIGVLAGMALI

SEQ ID NO: 152 - protein, 457 aa, Homo sapiens
MRSAAVLALLLCAGQVTALPVNSPMNKGDTEVMKCIVEVISDTLSKPSPMPVSQECFETLRGDERILSILRHQNLLKELQDLALQGAKERAHQQKKHSGFEDELSEVLENQSSQAELKEAVEEPSSKDVMEKREDSKEAEKSGEATDGARPQALPEPMQESKAEGNNQAPGEEEEEEEEATNTHPPASLPSQKYPGPQAEGDSEGLSQGLVDREKGLSAEPGWQAKREEEEEEEEEAEAGEEAVPEEEGPTVVLNPHPSLGYKEIRKGESRSEALAVDGAGKPGAEEAQDPEGKGEQEHSQQKEEEEEMAVVPQGLFRGGKSGELEQEEERLSKEWEDSKRWSKMDQLAKELTAEKRLEGQEEEEDNRDSSMKLSFRARAYGFRGPGPQLRRGWRPSSREDSLEAGLPLQVRGYPEEKKEEEGSANRRPEDQELESLSAIEAELEKVAHQLQALRRG

SEQ ID NO: 153 - protein, 266 aa, Homo sapiens
MHVNGKVALVTGAAQGIGRAFAEALLLKGAKVALVDWNLEAGVQCKAALHEQFEPQKTLFIQCDVADQQQLRDTFRKVVDHFGRLDILVNNAGVNNEKNWEKTLQINLVSVISGTYLGLDYMSKQNGGEGGIIINMSSLAGLMPVAQQPVYCASKHGIVGFTRSAALAANLMNSGVRLNAICPGFVNTAILESIEKEENMGQYIEYKDHIKDMIKYYGILDPPLIANGLITLIEDDALNGAIMKITTSKGIHFQDYDTTPFQAKTQ

SEQ ID NO: 154 - protein, 181 aa, Homo sapiens
MFSAIRSQHSGVDICINNAGLARPDTLLSGSTSGWKDMFNVNVLALSICTREAYQSMKERNVDDGHIININSMSGHRVLPLSVTHFYSATKYAVTALTEGLRQELREAQTHIRATCISPGVVETQFAFKLHDKDPEKAAATYEQMKCLKPEDVAEAVIYVLSTPAHIQIGDIQMRPTEQVT

SEQ ID NO: 155 - protein, 312 aa, Homo sapiens
MRMLLALLALSAARPSASAESHWCYEVQAESSNYPCLVPVKWGGNCQKDRQSPINIVTTKAKVDKKLGRFFFSGYDKKQTWTVQNNGHSVMMLLENKASISGGGLPAPYQAKQLHLHWSDLPYKGSEHSLDGEHFAMEMHIVHEKEKGTSRNVKEAQDPEDEIAVLAFLVEAGTQVNEGFQPLVEALSNIPKPEMSTTMAESSLLDLLPKEEKLRHYFRYLGSLTTPTCDEKVVWTVFREPIQLHREQILAFSQKLYYDKEQTVSMKDNVRPLQQLGQRTVIKSGAPGRPLPWALPALLGPMLACLLAGFLR

SEQ ID NO: 156 - protein, 398 aa, Homo sapiens
MLRLYVLVMGVSAFTLQPAAHTGAARSCRFRGRHYKREFRLEGEPVALRCPQVPYWLWASVSPRINLTWHKNDSARTVPGEEETRMWAQDGALWLLPALQEDSGTYVCTTRNASYCDKMSIELRVFENTDAFLPFISYPQILTLSTSGVLVCPDLSEFTRDKTDVKIQWYKDSLLLDKDNEKFLSVRGTTHLLVHDVALEDAGYYRCVLTFAHEGQQYNITRSIELRIKKKKEETIPVIISPLKTISASLGSRLTIPCKVFLGTGTPLTTMLWWTANDTHIESAYPGGRVTEGPRQEYSENNENYIEVPLIFDPVTREDLHMDFKCVVHNTLSFQTLRTTVKEASSTFSWGIVLAPLSLAFLVLGGIWMHRRCKHRTGKADGLTVLWPHHQDFQSYPK

SEQ ID NO: 157 - protein, 160 aa, Homo sapiens
MEKFNTISASKCNKETVAMKEKCKFGMTSTIPSGHVWRNTWNPVSCSLATVKMKECLRGKLIYLMGDSTIRQWMEYFKASINTLKSVDLHESGKLQHQLAVDLDRNINIQWQKYCYPLIGSMTYSVKEMEYLTRAIDRTGGEKKYCHCYFPGPAFQTLSH

SEQ ID NO: 158 - protein, 267 aa, Homo sapiens
MMSSKPTSHAEVNETIPNPYPPGSFMAPGFQQPLGSINLENQAQGAQRAQPYGITSPGIFASSQPGQGNIQMINPSVGTAVMNFKEEAKALGVIQIMVGLMHIGFGIVLCLISFSFREVLGFASTAVIGGYPFWGGLSFIISGSLSVSASKELSRCLVKGSLGMNIVSSILAFIGVILLLVDMCINGVAGQDYWAVLSGKGISATLMIFSLLEFFVACATAHFANQANTTTNMSVLVIPNMYESNPVTPASSSAPPRCNNYSANAPK

SEQ ID NO: 159 - protein, 157 aa, Homo sapiens
MLVLLAGIFVVHIATVIMLFVSTIANVWLVSNTVDASVGLWKNCTNISCSDSLSYASEDALKTVQAFMILSIIFCVIALLVFVFQLFTMEKGNRFFLSGATTLVCWLCILVGVSIYTSHYANRDGTQYHHGYSYILGWICFCFSFIIGVLYLVLRKK

SEQ ID NO: 160 - protein, 1035 aa, Homo sapiens
MSTENVEGKPSNLGERGRARSSTFLRVVQPMFNHSIFTSAVSPAAERIRFILGEEDDSPAPPQLFTELDELLAVDGQEMEWKETARWIKFEEKVEQGGERWSKPHVATLSLHSLFELRTCMEKGSIMLDREASSLPQLVEMIVDHQIETGLLKPELKDKVTYTLLRKHRHQTKKSNLRSLADIGKTVSSASRMFTNPDNGSPAMTHRNLTSSSLNDISDKPEKDQLKNKFMKKLPRDAEASNVLVGEVDFLDTPFIAFVRLQQAVMLGALTEVPVPTRFLFILLGPKGKAKSYHEIGRAIATLMSDEVFHDIAYKAKDRHDLIAGIDEFLDEVIVLPPGEWDPAIRIEPPKSLPSSDKRKNMYSGGENVQMNGDTPHDGGHGGGGHGDCEELQRTGRFCGGLIKDIKRKAPFFASDFYDALNIQALSAILFIYLATVTNAITFGGLLGDATDNMQGVLESFLGTAVSGAIFCLFAGQPLTILSSTGPVLVFERLLFNFSKDNNFDYLEFRLWIGLWSAFLCLILVATDASFLVQYFTRFTEEGFSSLISFIFIYDAFKKMIKLADYYPINSNFKVGYNTLFSCTCVPPDPANISISNDTTLAPEYLPTMSSTDMYHNTTFDWAFLSKKECSKYGGNLVGNNCNFVPDITLMSFILFLGTYTSSMALKKFKTSPYFPTTARKLISDFAIILSILIFCVIDALVGVDTPKLIVPSEFKPTSPNRGWFVPPFGENPWWVCLAAAIPALLVTILIFMDQQITAVIVNRKEHKLKKGAGYHLDLFWVAILMVICSLMALPWYVAATVISIAHIDSLKMETETSAPGEQPKFLGVREQRVTGTLVFILTGLSVFMAPILKFIPMPVLYGVFLYMGVASLNGVQFMDRLKLLLMPLKHQPDFIYLRHVPLRRVHLFTFLQVLCLALLWILKSTVAAIIFPVMILALVAVRKGMDYLFSQHDLSFLDDVIPEKDKKKKEDEKKKKKKKGSLDSDNDDSDCPYSEKVPSIKIPMDIMEQQPFLSDSKPSDRERSPTFLERHTSC

SEQ ID NO: 161 - protein, 375 aa, Homo sapiens
MSTAGKVIKCKAAVLWELKKPFSIEEVEVAPPKAHEVRIKMVAAGICRSDEHVVSGNLVTPLPVILGHEAAGIVESVGEGVTTVKPGDKVIPLFTPQCGKCRICKNPESNYCLKNDLGNPRGTLQDGTRRFTCSGKPIHHFVGVSTFSQYTVVDENAVAKIDAASPLEKVCLIGCGFSTGYGSAVKVAKVTPGSTCAVFGLGGVGLSVVMGCKAAGAARIIAVDINKDKFAKAKELGATECINPQDYKKPIQEVLKEMTDGGVDFSFEVIGRLDTMMASLLCCHEACGTSVIVGVPPDSQNLSINPMLLLTGRTWKGAIFGGFKSKESVPKLVADFMAKKFSLDALITNILPFEKINEGFDLLRSGKSIRTVLTF

SEQ ID NO: 162 - protein, 526 aa, Homo sapiens
MGHLSAPLHRVRVPWQGLLLTASLLTFWNPPTTAQLTTESMPFNVAEGKEVLLLVHNLPQQLFGYSWYKGERVDGNRQIVGYAIGTQQATPGPANSGRETIYPNASLLIQNVTQNDTGFYTLQVIKSDLVNEEATGQFHVYPELPKPSISSNNSNPVEDKDAVAFTCEPETQDTTYLWWINNQSLPVSPRLQLSNGNRTLTLLSVTRNDTGPYECEIQNPVSANRSDPVTLNVTYGPDTPTISPSDTYYRPGANLSLSCYAASNPPAQYSWLINGTFQQSTQELFIPNITVNNSGSYTCHANNSVTGCNRTTVKTIIVTELSPVVAKPQIKASKTTVTGDKDSVNLTCSTNDTGISIRWFFKNQSLPSSERMKLSQGNTTLSINPVKREDAGTYWCEVFNPISKNQSDPIMLNVNYNALPQENGLSPGAIAGIVIGVVALVALIAVALACFLHFGKTGRASDQRDLTEHKPSVSNHTQDHSNDPPNKMNEVTYSTLNFEAQQPTQPTSASPSLTATEIIYSEVKKQ

SEQ ID NO: 163 - protein, 255 aa, Homo sapiens
MHQKIAREMNLSETAFIRKLHPTDNFAQSSCFGLRWFTPASEVPLCGHATLASAAVLFHKIKNMNSTLTFVTLSGELRARRAEDGIVLDLPLYPAHPQDFHEVEDLIKTAIGNTLVQDICYSPDTQKLLVRLSDVYNRSFLENLKVNTENLLQVENTGKVKGLILTLKGEPGGQTQAFDFYSRYFAPWVGVAEDPVTGSAHAVLSSYWSQHLGKKEMHAFQCSHRGGELGISLRPDGRVDIRGGAAVVLEGTLTA

SEQ ID NO: 164 - protein, 622 aa, Homo sapiens
MPPQLQNGLNLSAKVVQGSLDSLPQAVREFLENNAELCQPDHIHICDGSEEENGRLLGQMEEEGILRRLKKYDNCWLALTDPRDVARIESKTVIVTQEQRDTVPIPKTGLSQLGRWMSEEDFEKAFNARFPGCMKGRTMYVIPFSMGPLGSPLSKIGIELTDSPYVVASMRIMTRMGTPVLEALGDGEFVKCLHSVGCPLPLQKPLVNNWPCNPELTLIAHLPDRREIISFGSGYGGNSLLGKKCFALRMASRLAEEEGWLAEHMLILGITNPEGEKKYLAAAFPSACGKTNLAMMNPSLPGWKVECVGDDIAWMKFDAQGHLRAINPENGFFGVAPGTSVKTNPNAIKTIQKNTIFTNVAETSDGGVYWEGIDEPLASGVTITSWKNKEWSSEDGEPCAHPNSRFCTPASQCPIIDAAWESPEGVPIEGIIFGGRRPAGVPLVYEALSWQHGVFVGAAMRSEATAAAEHKGKIIMHDPFAMRPFFGYNFGKYLAHWLSMAQHPAAKLPKIFHVNWFRKDKEGKFLWPGFGENSRVLEWMFNRIDGKASTNVTPIGYIPKEDALNLKGLGHINMMELFSISKEFWDKEVEDIEKYLVDQVNADLPCEIEREILALKQRISQM

SEQ ID NO: 165 - protein, 530 aa, Homo sapiens
MSLKWMSVFLLMQLSCYFSSGSCGKVLVWPTEYSHWINMKTILEELVQRGHEVIVLTSSASILVNASKSSAIKLEVYPTSLTKNDLEDFFMKMFDRWTYSISKNTFWSYFSQLQELCWEYSDYNIKLCEDAVLNKKLMRKLQESKFDVLLADAVNPCGELLAELLNIPFLYSLRFSVGYTVEKNGGGFLFPPSYVPVVMSELSDQMIFMERIKNMIYMLYFDFWFQAYDLKKWDQFYSEVLGRPTTLFETMGKAEMWLIRTYWDFEFPRPFLPNVDFVGGLHCKPAKPLPKEMEEFVQSSGENGIVVFSLGSMISNMSEESANMIASALAQIPQKVLWRFDGKKPNTLGSNTRLYKWLPQNDLLGHPKTKAFITHGGTNGIYEAIYHGIPMVGIPLFADQHDNIAHMKAKGAALSVDIRTMSSRDLLNALKSVINDPIYKENIMKLSRIHHDQPVKPLDRAVFWIEFVMRHKGAKHLRVAAHNLTWIQYHSLDVIAFLLACVATMIFMITKCCLFCFRKLAKTGKKKKRD

SEQ ID NO: 166 - protein, 387 aa, Homo sapiens
MSTFFSDTAWICLAVPTVLCGTVFCKYKKSSGQLWSWMVCLAGLCAVCLLILSPFWGLILFSVSCFLMYTYLSGQELLPVDQKAVLVTGGDCGLGHALCKYLDELGFTVFAGVLNENGPGAEELRRTCSPRLSVLQMDITKPVQIKDAYSKVAAMLQDRGLWAVINNAGVLGFPTDGELLLMTDYKQCMAVNFFGTVEVTKTFLPLLRKSKGRLVNVSSMGGGAPMERLASYGSSKAAVTMFSSVMRLELSKWGIKVASIQPGGFLTNIAGTSDKWEKLEKDILDHLPAEVQEDYGQDYILAQRNFLLLINSLASKDFSPVLRDIQHAILAKSPFAYYTPGKGAYLWICLAHYLPIGIYDYFAKRHFGQDKPMPRALRMPNYKKKAT

SEQ ID NO: 167 - protein, 196 aa, Homo sapiens
MGSRSSHAAVIPDGDSIRRETGFSQASLLRLHHRFRALDRNKKGYLSRMDLQQIGALAVNPLGDRIIESFFPDGSQRVDFPGFVRVLAHFRPVEDEDTETQDPKKPEPLNSRRNKLHYAFQLYDLDRDGKISRHEMLQVLRLMVGVQVTEEQLENIADRTVQEADEDGDGAVSFVEFTKSLEKMDVEQKMSIRILK

SEQ ID NO: 168 - protein, 319 aa, Homo sapiens
MLFWVLGLLILCGFLWTRKGKLKIEDITDKYIFITGCDSGFGNLAARTFDKKGFHVIAACLTESGSTALKAETSERLRTVLLDVTDPENVKRTAQWVKNQVGEKGLWGLINNAGVPGVLAPTDWLTLEDYREPIEVNLFGLISVTLNMLPLVKKAQGRVINVSSVGGRLAIVGGGYTPSKYAVEGFNDSLRRDMKAFGVHVSCIEPGLFKTNLADPVKVIEKKLAIWEQLSPDIKQQYGEGYIEKSLDKLKGNKSYVNMDLSPVVECMDHALTSLFPKTHYAAGKDAKIFWIPLSHMPAALQDFLLLKQKAELANPKAV

SEQ ID NO: 169 - protein, 200 aa, Homo sapiens
MGQEFSWEEAEAAGEIDVAELQEWYKKFVMECPSGTLFMHEFKRFFKVTDDEEASQYVEGMFRAFDKNGDNTIDFLEYVAALNLVLRGTLEHKLKWTFKIYDKDGNGCIDRLELLNIVEGIYQLKKACRRELQTEQDQLLTPEEVVDRIFLLVDENGDGQLSLNEFVEGARRDKWVMKMLQMDMNPSSWLAQQRRKSAMF

SEQ ID NO: 170 - protein, 280 aa, Homo sapiens
MAEKFDCHYCRDPLQGKKYVQKDGHHCCLKCFDKFCANTCVECRKPIGADSKEVHYKNRFWHDTCFRCAKCLHPLANETFVAKDNKILCNKCTTREDSPKCKGCFKAIVAGDQNVEYKGTVWHKDCFTCSNCKQVIGTGSFFPKGEDFYCVTCHETKFAKHCVKCNKAITSGGITYQDQPWHADCFVCVTCSKKLAGQRFTAVEDQYYCVDCYKNFVAKKCAGCKNPITGFGKGSSVVAYEGQSWHDYCFHCKKCSVNLANKRFVFHQEQVYCPDCAKKL

SEQ ID NO: 171 - protein, 470 aa, Homo sapiens
MLRGISQLPAVATMSWVLLPVLWLIVQTQAIAIKQTPELTLHEIVCPKKLHILHKREIKNNQTEKHGKEERYEPEVQYQMILNGEEIILSLQKTKHLLGPDYTETLYSPRGEEITTKPENMEHCYYKGNILNEKNSVASISTCDGLRGYFTHHHQRYQIKPLKSTDEKEHAVFTSNQEEQDPANHTCGVKSTDGKQGPIRISRSLKSPEKEDFLRAQKYIDLYLVLDNAFYKNYNENLTLIRSFVFDVMNLLNVIYNTIDVQVALVGMEIWSDGDKIKVVPSASTTFDNFLRWHSSNLGKKIHDHAQLLSGISFNNRRVGLAASNSLCSPSSVAVIEAKKKNNVALVGVMSHELGHVLGMPDVPFNTKCPSGSCVMNQYLSSKFPKDFSTSCRAHFERYLLSQKPKCLLQAPIPTNIMTTPVCGNHLLEVGEDCDCGSPKECTNLCCEALTCKLKPGTDCGGDAPNHTTE

SEQ ID NO: 172 - protein, 86 aa, Homo sapiens
MAVRQWVIALALAALLVVDREVPVAAGKLPFSRMPICEHMVESPTCSQMSNLVCGTDGLTYTNECQLCLARIKTKQDIQIMKDGKC

SEQ ID NO: 173 - protein, 261 aa, Homo sapiens
MASPDWGYDDKNGPEQWSKLYPIANGNNQSPVDIKTSETKHDTSLKPISVSYNPATAKEIINVGHSFHVNFEDNDNRSVLKGGPFSDSYRLFQFHFHWGSTNEHGSEHTVDGVKYSAELHVAHWNSAKYSSLAEAASKADGLAVIGVLMKVGEANPKLQKVLDALQAIKTKGKRAPFTNFDPSTLLPSSLDFWTYPGSLTHPPLYESVTWIICKESISVSSEQLAQFRSLLSNVEGDNAVPMQHNNRPTQPLKGRTVRASF

SEQ ID NO: 174 - protein, 431 aa, Homo sapiens
MTVKTEAAKGTLTYSRMRGMVAILIAFMKQRRMGLNDFIQKIANNSYACKHPEVQSILKISQPQEPELMNANPSPPPSPSQQINLGPSSNPHAKPSDFHFLKVIGKGSFGKVLLARHKAEEVFYAVKVLQKKAILKKKEEKHIMSERNVLLKNVKHPFLVGLHFSFQTADKLYFVLDYINGGELFYHLQRERCFLEPRARFYAAEIASALGYLHSLNIVYRDLKPENILLDSQGHIVLTDFGLCKENIEHNSTTSTFCGTPEYLAPEVLHKQPYDRTVDWWCLGAVLYEMLYGLPPFYSRNTAEMYDNILNKPLQLKPNITNSARHLLEGLLQKDRTKRLGAKDDFMEIKSHVFFSLINWDDLINKKITPPFNPNVSGPNDLRHFDPEFTEEPVPNSIGKSPDSVLVTASVKEAAEAFLGFSYAPPTDSFL

SEQ ID NO: 175 - protein, 381 aa, Homo sapiens
MPFSNSHNALKLRFPAEDEFPDLSAHNNHMAKVLTPELYAELRAKSTPSGFTLDDVIQTGVDNPGHPYIMTVGCVAGDEESYEVFKDLFDPIIEDRHGGYKPSDEHKTDLNPDNLQGGDDLDPNYVLSSRVRTGRSIRGFCLPPHCSRGERRAIEKLAVEALSSLDGDLAGRYYALKSMTEAEQQQLIDDHFLFDKPVSPLLLASGMARDWPDARGIWHNDNKTFLVWVNEEDHLRVISMQKGGNMKEVFTRFCTGLTQIETLFKSKDYEFMWNPHLGYILTCPSNLGTGLRAGVHIKLPNLGKHEKFSEVLKRLRLQKRGTGGVDTAAVGGVFDVSNADRLGFSEVELVQMVVDGVKLLIEMEQRLEQGQAIDDLMPAQK

SEQ ID NO: 176 - protein, 739 aa, Homo sapiens
MSSESKEQHNVSPRDSAEGNDSYPSGIHLELQRESSTDFKQFETNDQCRPYHRILIERQEKSDTNFKEFVIKKLQKNCQCSPAKAKNMILGFLPVLQWLPKYDLKKNILGDVMSGLIVGILLVPQSIAYSLLAGQEPVYGLYTSFFASIIYFLLGTSRHISVGIFGVLCLMIGETVDRELQKAGYDNAHSAPSLGMVSNGSTLLNHTSDRICDKSCYAIMVGSTVTFIAGVYQVAMGFFQVGFVSVYLSDALLSGFVTGASFTILTSQAKYLLGLNLPRTNGVGSLITTWIHVFRNIHKTNLCDLITSLLCLLVLLPTKELNEHFKSKLKAPIPIELVVVVAATLASHFGKLHENYNSSIAGHIPTGFMPPKVPEWNLIPSVAVDAIAISIIGFAITVSLSEMFAKKHGYTVKANQEMYAIGFCNIIPSFFHCFTTSAALAKTLVKESTGCHTQLSGVVTALVLLLVLLVIAPLFYSLQKSVLGVITIVNLRGALRKFRDLPKMWSISRMDTVIWFVTMLSSALLSTEIGLLVGVCFSIFCVILRTQKPKSSLLGLVEESEVFESVSAYKNLQTKPGIKIFRFVAPLYYINKECFKSALYKQTVNPILIKVAWKKAAKRKIKEKVVTLGGIQDEMSVQLSHDPLELHTIVIDCSAIQFLDTAGIHTLKEVRRDYEAIGIQVLLAQCNPTVRDSLTNGEYCKKEEENLLFYSVYEAMAFAEVSKNQKGVCVPNGLSLSSD

SEQ ID NO: 177 - protein, 709 aa, Homo sapiens
MAEVEDQAARDMKRLEEKDKERKNVKGIRDDIEEEDDQEAYFRYMAENPTAGVVQEEEEDNLEYDSDGNPIAPTKKIIDPLPPIDHSEIDYPPFEKNFYNEHEEITNLTPQQLIDLRHKLNLRVSGAAPPRPGSSFAHFGFDEQLMHQIRKSEYTQPTPIQCQGVPVALSGRDMIGIAKTGSGKTAAFIWPMLIHIMDQKELEPGDGPIAVIVCPTRELCQQIHAECKRFGKAYNLRSVAVYGGGSMWEQAKALQEGAEIVVCTPGRLIDHVKKKATNLQRVSYLVFDEADRMFDMGFEYQVRSIASHVRPDRQTLLFSATFRKKIEKLARDILIDPIRVVQGDIGEANEDVTQIVEILHSGPSKWNWLTRRLVEFTSSGSVLLFVTKKANAEELANNLKQEGHNLGLLHGDMDQSERNKVISDFKKKDIPVLVATDVAARGLDIPSIKTVINYDVARDIDTHTHRIGRTGRAGEKGVAYTLLTPKDSNFAGDLVRNLEGANQHVSKELLDLAMQNAWFRKSRFKGGKGKKLNIGGGGLGYRERPGLGSENMDRGNNNVMSNYEAYKPSTGAMGDRLTAMKAAFQSQYKSHFVAASLSNQKAGSSAAGASGWTSAGSLNSVPTNSAQQGHNSPDSPVTSAAKGIPGFGNTGNISGAPVTYPSAGAQGVNNTASGNNSREGTGGSNGKRERYTENRGSSPSQSRRDWQSA

SEQ ID NO: 178 - protein, 5178 aa, Homo sapiens
MGLPLARLAAVCLALSLAGGSELQTEGRTRYHGRNVCSTWGNFHYKTFDGDVFRFPGLCDYNFASDCRGSYKEFAVHLKRGPGQAEAPAGVESILLTIKDDTIYLTRHLAVLNGAVVSTPHYSPGLLIEKSDAYTKVYSRAGLTLMWNREDALMLELDTKFRNHTCGLCGDYNGLQSYSEFLSDGVLFSPLEFGNMQKINQPDVVCEDPEEEVAPASCSEHRAECERLLTAEAFADCQDLVPLEPYLRACQQDRCRCPGGDTCVCSTVAEFSRQCSHAGGRPGNWRTATLCPKTCPGNLVYLESGSPCMDTCSHLEVSSLCEEHRMDGCFCPEGTVYDDIGDSGCVPVSQCHCRLHGHLYTPGQEITNDCEQCVCNAGRWVCKDLPCPGTCALEGGSHITTFDGKTYTFHGDCYYVLAKGDHNDSYALLGELAPCGSTDKQTCLKTVVLLADKKKNAVVFKSDGSVLLNQLQVNLPHVTASFSVFRPSSYHIMVSMAIGVRLQVQLAPVMQLFVTLDQASQGQVQGLCGNFNGLEGDDFKTASGLVEATGAGFANTWKAQSTCHDKLDWLDDPCSLNIESANYAEHWCSLLKKTETPFGRCHSAVDPAEYYKRCKYDTCNCQNNEDCLCAALSSYARACTAKGVMLWGWREHVCNKDVGSCPNSQVFLYNLTTCQQTCRSLSEADSHCLEGFAPVDGCGCPDHTFLDEKGRCVPLAKCSCYHRGLYLEAGDVVVRQEERCVCRDGRLHCRQIRLIGQSCTAPKIHMDCSNLTALATSKPRALSCQTLAAGYYHTECVSGCVCPDGLMDDGRGGCVVEKECPCVHNNDLYSSGAKIKVDCNTCTCKRGRWVCTQAVCHGTCSIYGSGHYITFDGKYYDFDGHCSYVAVQDYCGQNSSLGSFSIITENVPCGTTGVTCSKAIKIFMGRTELKLEDKHRVVIQRDEGHHVAYTTREVGQYLVVESSTGIIVIWDKRTTVFIKLAPSYKGTVCGLCGNFDHRSNNDFTTRDHMVVSSELDFGNSWKEAPTCPDVSTNPEPCSLNPHRRSWAEKQCSILKSSVFSICHSKVDPKPFYEACVHDSCSCDTGGDCECFCSAVASYAQECTKEGACVFWRTPDLCPIFCDYYNPPHECEWHYEPCGNRSFETCRTINGIHSNISVSYLEGCYPRCPKDRPIYEEDLKKCVTADKCGCYVEDTHYPPGASVPTEETCKSCVCTNSSQVVCRPEEGKILNQTQDGAFCYWEICGPNGTVEKHFNICSITTRPSTLTTFTTITLPTTPTSFTTTTTTTTPTSSTVLSTTPKLCCLWSDWINEDHPSSGSDDGDREPFDGVCGAPEDIECRSVKDPHLSLEQHGQKVQCDVSVGFICKNEDQFGNGPFGLCYDYKIRVNCCWPMDKCITTPSPPTTTPSPPPTTTTTLPPTTTPSPPTTTTTTPPPTTTPSPPITTTTTPLPTTTPSPPISTTTTPPPTTTPSPPTTTPSPPTTTPSPPTTTTTTPPPTTTPSPPMTTPITPPASTTTLPPTTTPSPPTTTTTTPPPTTTPSPPTTTPITPPTSTTTLPPTTTPSPPPTTTTTPPPTTTPSPPTTTTPSPPTITTTTPPPTTTPSPPTTTTTTPPPTTTPSPPTTTPITPPTSTTTLPPTTTPSPPPTTTTTPPPTTTPSPPTTTTPSPPITTTTTPPPTTTPSSPITTTPSPPTTTMTTPSPTTTPSSPITTTTTPSSTTTPSPPPTTMTTPSPTTTPSPPTTTMTTLPPTTTSSPLTTTPLPPSITPPTFSPFSTTTPTTPCVPLCNWTGWLDSGKPNFHKPGGDTELIGDVCGPGWAANISCRATMYPDVPIGQLGQTVVCDVSVGLICKNEDQKPGGVIPMAFCLNYEINVQCCECVTQPTTMTTTTTENPTPPTTTPITTTTTVTPTPTPTGTQTPTTTPITTTTTVTPTPTPTGTQTPTTTPITTTTTVTPTPTPTGTQTPTTTPITTTTTVTPTPTPTGTQTPTTTPITTTTTVTPTPTPTGTQTPTTTPITTTTTVTPTPTPTGTQTPTTTPITTTTTVTPTPTPTGTQTPTTTPITTTTTVTPTPTPTGTQTPTTTPITTTTTVTPTPTPTGTQTPTTTPITTTTTVTPTPTPTGTQTPTTTPITTTTTVTPTPTPTGTQTPTTTPITTTTTVTPTPTPTGTQTPTTTPITTTTTVTPTPTPTGTQTPTTTPITTTTTVTPTPTPTGTQTPTTTPITTTTTVTPTPTPTGTQTPTTTPITTTTTVTPTPTPTGTQTPTTTPITTTTTVTPTPTPTGTQTPTTTPITTTTTVTPTPTPTGTQTPTTTPITTTTTVTPTPTPTGTQTPTTTPITTTTTVTPTPTPTGTQTPTTTPITTTTTVTPTPTPTGTQTPTTTPITTTTTVTPTPTPTGTQTPTTTPITTTTTVTPTPTPTGTQTPTTTPITTTTTVTPTPTPTGTQTPTTTPITTTTTVTPTPTPTGTQTPTTTPITTTTTVTPTPTPTGTQTPTTTPITTTTTVTPTPTPTGTQTPTTTPITTTTTVTPTPTPTGTQTPTTTPITTTTTVTPTPTPTGTQTPTTTPITTTTTVTPTPTPTGTQTPTTTPITTTTTVTPTPTPTGTQTPTTTPITTTTTVTPTPTPTGTQTPTTTPITTTTTVTPTPTPTGTQTPTTTPITTTTTVTPTPTPTGTQTPTTTPITTTTTVTPTPTPTGTQTPTTTPITTTTTVTPTPTPTGTQTPTTTPITTTTTVTPTPTPTGTQTPTTTPITTTTTVTPTPTPTGTQTPTTTPITTTTTVTPTPTPTGTQTPTTTPITTTTTVTPTPTPTGTQTPTTTPITTTTTVTPTPTPTGTQTPTTTPITTTTTVTPTPTPTGTQTPTTTPITTTTTVTPTPTPTGTQTPTTTPITTTTTVTPTPTPTGTQTPTTTPITTTTTVTPTPTPTGTQTPTTTPITTTTTVTPTPTPTGTQTPTTTPITTTTTVTPTPTPTGTQTPTTTPITTTTTVTPTPTPTGTQTPTTTPITTTTTVTPTPTPTGTQTPTTTPITTTTTVTPTPTPTGTQTPTTTPITTTTTVTPTPTPTGTQTPTTTPITTTTTVTPTPTPTGTQTPTTTPITTTTTVTPTPTPTGTQTPTTTPITTTTTVTPTPTPTGTQTPTTTPITTTTTVTPTPTPTGTQTPTTTPITTTTTVTPTPTPTGTQTPTTTPITTTTTVTPTPTPTGTQTPTTTPITTTTTVTPTPTPTGTQTPTTTPITTTTTVTPTPTPTGTQTPTTTPITTTTTVTPTPTPTGTQTPTTTPITTTTTVTPTPTPTGTQTPTTTPITTTTTVTPTPTPTGTQTPTTTPITTTTTVTPTPTPTGTQTPTTTPITTTTTVTPTPTPTGTQTPTTTPITTTTTVTPTPTPTGTQTPTTTPITTTTTVTPTPTPTGTQTPTTTPITTTTTVTPTPTPTGTQTPTTTPITTTTTVTPTPTPTGTQTPTTTPITTTTTVTPTPTPTGTQTPTTTPITTTTTVTPTPTPTGTQTPTTTPITTTTTVTPTPTPTGTQTPTTTPITTTTTVTPTPTPTGTQTPTTTPITTTTTVTPTPTPTGTQTPTTTPITTTTTVTPTPTPTGTQTPTTTPITTTTTVTPTPTPTGTQTPTTTPITTTTTVTPTPTPTGTQTPTTTPITTTTTVTPTPTPTGTQTPTTTPITTTTTVTPTPTPTGTQTPTTTPITTTTTVTPTPTPTGTQTPTTTPITTTTTVTPTPTPTGTQTPTTTPITTTTTVTPTPTPTGTQTPTTTPITTTTTVTPTPTPTGTQTPTTTPITTTTTVTPTPTPTGTQTPTTTPITTTTTVTPTPTPTGTQTPTTTPITTTTTVTPTPTPTGTQTPTTTPITTTTTVTPTPTPTGTQTPTTTPITTTTTVTPTPTPTGTQTPTTTPITTTTTVTPTPTPTGTQTPTTTPITTTTTVTPTPTPTGTQTPTTTPITTTTTVTPTPTPTGTQTPTTTPITTTTTVTPTPTPTGTQTPTTTPITTTTTVTPTPTPTGTQTPTTTPITTTTTVTPTPTPTGTQTPTTTPITTTTTVTPTPTPTGTQTPTTTPITTTTTVTPTPTPTGTQTPTTTPITTTTTVTPTPTPTGTQTPTTTPITTTTTVTPTPTPTGTQTPTTTPITTTTTVTPTPTPTGTQTPTTTPITTTTTVTPTPTPTGTQTPTTTPITTTTTVTPTPTPTGTQTGPPTHTSTAPIAELTTSNPPPESSTPQTSRSTSSPLTESTTLLSTLPPAIEMTSTAPPSTPTAPTTTSGGHTLSPPPSTTTSPPGTPTRGTTTGSSSAPTPSTVQTTTTSAWTPTPTPLSTPSIIRTTGLRPYPSSVLICCVLNDTYYAPGEEVYNGTYGDTCYFVNCSLSCTLEFYNWSCPSTPSPTPTPSKSTPTPSKPSSTPSKPTPGTKPPECPDFDPPRQENETWWLCDCFMATCKYNNTVEIVKVECEPPPMPTCSNGLQPVRVEDPDGCCWHWECDCYCTGWGDPHYVTFDGLYYSYQGNCTYVLVEEISPSVDNFGVYIDNYHCDPNDKVSCPRTLIVRHETQEVLIKTVHMMPMQVQVQVNRQAVALPYKKYGLEVYQSGINYVVDIPELGVLVSYNGLSFSVRLPYHRFGNNTKGQCGTCTNTTSDDCILPSGEIVSNCEAAADQWLVNDPSKPHCPHSSSTTKRPAVTVPGGGKTTPHKDCTPSPLCQLIKDSLFAQCHALVPPQHYYDACVFDSCFMPGSSLECASLQAYAALCAQQNICLDWRNHTHGACLVECPSHREYQACGPAEEPTCKSSSSQQNNTVLVEGCFCPEGTMNYAPGFDVCVKTCGCVGPDNVPREFGEHFEFDCKNCVCLEGGSGIICQPKRCSQKPVTHCVEDGTYLATEVNPADTCCNITVCKCNTSLCKEKPSVCPLGFEVKSKMVPGRCCPFYWCESKGVCVHGNAEYQPGSPVYSSKCQDCVCTDKVDNNTLLNVIACTHVPCNTSCSPGFELMEAPGECCKKCEQTHCIIKRPDNQHVILKPGDFKSDPKNNCTFFSCVKIHNQLISSVSNITCPNFDASICIPGSITFMPNGCCKTCTPRNETRVPCSTVPVTTEVSYAGCTKTVLMNHCSGSCGTFVMYSAKAQALDHSCSCCKEEKTSQREVVLSCPNGGSLTHTYTHIESCQCQDTVCGLPTGTSRRARRSPRHLGS

SEQ ID NO: 179 - protein, 508 aa, Homo sapiens
MQRLLTPVKRILQLTRAVQETSLTPARLLPVAHQRFSTASAVPLAKTDTWPKDVGILALEVYFPAQYVDQTDLEKYNNVEAGKYTVGLGQTRMGFCSVQEDINSLCLTVVQRLMERIQLPWDSVGRLEVGTETIIDKSKAVKTVLMELFQDSGNTDIEGIDTTNACYGGTASLFNAANWMESSSWDGRYAMVVCGDIAVYPSGNARPTGGAGAVAMLIGPKAPLALERGLRGTHMENVYDFYKPNLASEYPIVDGKLSIQCYLRALDRCYTSYRKKIQNQWKQAGSDRPFTLDDLQYMIFHTPFCKMVQKSLARLMFNDFLSASSDTQTSLYKGLEAFGGLKLEDTYTNKDLDKALLKASQDMFDKKTKASLYLSTHNGNMYTSSLYGCLASLLSHHSAQELAGSRIGAFSYGSGLAASFFSFRVSQDAAPGSPLDKLVSSTSDLPKRLASRKCVSPEEFTEIMNQREQFYHKVNFSPPGDTNSLFPGTWYLERVDEQHRRKYARRPV

SEQ ID NO: 180 - protein, 914 aa, Homo sapiens
MGPFKSSVFILILHLLEGALSNSLIQLNNNGYEGIVVAIDPNVPEDETLIQQIKDMVTQASLYLFEATGKRFYFKNVAILIPETWKTKADYVRPKLETYKNADVLVAESTPPGNDEPYTEQMGNCGEKGERIHLTPDFIAGKKLAEYGPQGKAFVHEWAHLRWGVFDEYNNDEKFYLSNGRIQAVRCSAGITGTNVVKKCQGGSCYTKRCTFNKVTGLYEKGCEFVLQSRQTEKASIMFAQHVDSIVEFCTEQNHNKEAPNKQNQKCNLRSTWEVIRDSEDFKKTTPMTTQPPNPTFSLLQIGQRIVCLVLDKSGSMATGNRLNRLNQAGQLFLLQTVELGSWVGMVTFDSAAHVQSELIQINSGSDRDTLAKRLPAAASGGTSICSGLRSAFTVIRKKYPTDGSEIVLLTDGEDNTISGCFNEVKQSGAIIHTVALGPSAAQELEELSKMTGGLQTYASDQVQNNGLIDAFGALSSGNGAVSQRSIQLESKGLTLQNSQWMNGTVIVDSTVGKDTLFLITWTTQPPQILLWDPSGQKQGGFVVDKNTKMAYLQIPGIAKVGTWKYSLQASSQTLTLTVTSRASNATLPPITVTSKTNKDTSKFPSPLVVYANIRQGASPILRASVTALIESVNGKTVTLELLDNGAGADATKDDGVYSRYFTTYDTNGRYSVKVRALGGVNAARRRVIPQQSGALYIPGWIENDEIQWNPPRPEINKDDVQHKQVCFSRTSSGGSFVASDVPNAPIPDLFPPGQITDLKAEIHGGSLINLTWTAPGDDYDHGTAHKYIIRISTSILDLRDKFNESLQVNTTALIPKEANSEEVFLFKPENITFENGTDLFIAIQAVDKVDLKSEISNIARVSLFIPPQTPPETPSPDETSAPCPNIHINSTIPGIHILKIMWKWIGELQLSIA

SEQ ID NO: 181 - protein, 61 aa, Homo sapiens
MDPNCSCAAGVSCTCAGSCKCKECKCTSCKKSCCSCCPVGCSKCAQGCVCKGASEKCSCCD

SEQ ID NO: 182 - protein, 260 aa, Homo sapiens
MSHHWGYGKHNGPEHWHKDFPIAKGERQSPVDIDTHTAKYDPSLKPLSVSYDQATSLRILNNGHAFNVEFDDSQDKAVLKGGPLDGTYRLIQFHFHWGSLDGQGSEHTVDKKKYAAELHLVHWNTKYGDFGKAVQQPDGLAVLGIFLKVGSAKPGLQKVVDVLDSIKTKGKSADFTNFDPRGLLPESLDYWTYPGSLTTPPLLECVTWIVLKEPISVSSEQVLKFRKLNFNGEGEPEELMVDNWRPAQPLKNRQIKASFK

SEQ ID NO: 183 - protein, 61 aa, Homo sapiens
MDPNCSCEAGGSCACAGSCKCKKCKCTSCKKSCCSCCPLGCAKCAQGCICKGASEKCSCCA

SEQ ID NO: 184 - protein, 61 aa, Homo sapiens
MDPNCSCAAGVSCTCASSCKCKECKCTSCKKSCCSCCPVGCAKCAQGCICKGASEKCSCCA

SEQ ID NO: 185 - protein, 167 aa, Homo sapiens
MLTVALLALLCASASGNAIQARSSSYSGEYGSGGGKRFSHSGNQLDGPITALRVRVNTYYIVGLQVRYGKVWSDYVGGRNGDLEEIFLHPGESVIQVSGKYKWYLKKLVFVTDKGRYLSFGKDSGTSFNAVPLHPNTVLRFISGRSGSLIDAIGLHWDVYPTSCSRC

SEQ ID NO: 186 - protein, 61 aa, Homo sapiens
MDPNCSCSPVGSCACAGSCKCKECKCTSCKKSCCSCCPVGCAKCAQGCICKGTSDKCSCCA
